(19) United States
(12) Patent Application Publication
(10) Pub. No.: US 2022/0228186 A1
(43) Pub. Date: Jul. 21, 2022

(54) COMPOSITIONS AND METHODS FOR PRODUCING STEVIOL GLYCOSIDES

(71) Applicant: Arzeda Corp., Seattle, WA (US)

(72) Inventors: Alexandre ZANGHELLINI, Seattle, WA (US); Kyle ROBERTS, Seattle, WA (US); Mark NANCE, Seattle, WA (US); Joshua RHEA, Seattle, WA (US)

(21) Appl. No.: 17/613,752

(22) PCT Filed: May 22, 2020
(86) PCT No.: PCT/US2020/034417

§ 371 Date: Nov. 23, 2021

Related U.S. Application Data
(60) Provisional application No. 62/851,772, filed on May 23, 2019.

(51) Int. Cl. C12P 19/56; C12P 19/18; C12N 9/10; C12N 1/20; C12N 15/70; C07H 15/24

(52) U.S. Cl. CPC C12P 19/56; C12P 19/18; C12N 9/1051; C12N 2800/101; C12N 15/70; C07H 15/24; C12N 1/20

(57) ABSTRACT

The present invention provides compositions and methods for producing steviol glycosides, particularly rebD, rebM and isomers thereof. The method includes use of glycosyltransferases that can transfer a glucose moiety from non-UDP-sugar sugar donors to steviol glycosides.

### CROSS-REFERENCE TO RELATED APPLICATIONS

[0001] This application claims the benefit of priority to U.S. provisional application No. 62/851,772 filed on May 23, 2019, which is hereby incorporated by reference in its entirety.

### CROSS-REFERENCE TO SEQUENCE LISTING

[0002] The contents of the text file submitted electronically herewith are incorporated herein by reference in their entirety: A computer readable format copy of the Sequence Listing (file-name: ARZE_030_01WO_SeqList_ST25.txt, date recorded: May 20, 2020, file size 689 kilo-bytes).

### FIELD

[0003] The present disclosure relates to enzymes and biocatalytic processes for producing steviol glycosides. The present disclosure particularly relates to use of glycosyltransferases that can transfer a glucose moiety from non-UDP-sugar sugar donors to steviol glycosides.

### BACKGROUND

[0004] The species Stevia rebaudiana is commonly grown for its sweet leaves, which have traditionally been used as a sweetener. Stevia extract is considered 200-300 times sweeter than sugar and is used commercially as a high intensity sweetener. The main glycoside component of stevia leaf are steviosides and rebaudiosides. Over ten different steviol glycosides are present in appreciable quantities in the leaf. The principal sweetening compounds are stevioside and rebaudioside A. Rebaudioside A (Reb A) is considered higher value compared to stevioside, because of its increased sweetness and decreased bitterness.

### SUMMARY OF THE INVENTION

[0005] The present disclosure provides a method for transferring a sugar moiety to a substrate steviol glycoside.

[0006] The sweetness and bitterness profiles of Reb D and Reb M are improved compared to Reb A, but are present at very low quantities in the stevia leaf. Reb D can be made by the addition of a single glucose molecule to Reb A. Similarly, Reb M can be produced by adding a single glucose molecule to Reb D. Native glycosyltransferases that make Reb D and Reb M use UDP-glucose as the glucose source for transferring to Reb A or Reb D, respectively. However, UDP-glucose is an expensive co-substrate and adds significant costs to any process that utilizes the compound. In some embodiments, the method comprises contacting the substrate steviol glycoside with a glycosyltransferase polypeptide and a non-UDP-sugar sugar donor.

[0007] Advantageously, the methods provide great economic benefit to making these rebaudiosides through an enzymatic reaction that uses an alternative, less expensive sugar donor than UDP-glucose. Thus, the disclosed methods provide novel glycosyltransferases and methods for transferring a glucose moiety from non-UDP-sugar sugar donors to steviol glycosides.

[0008] The methods of the disclosure provide glycosyltransferase polypeptides that comprise an amino acid sequence that is at least 60%, at least 65%, at least 70%, at least 75%, at least 80%, at least 85%, at least 90%, at least 95%, at least 98%, or at least 99% identical to an amino acid sequence selected from the group consisting of SEQ ID NOs: 1-128. The glycosyltransferase polypeptide may comprise, or consist of, an amino acid sequence selected from the group consisting of SEQ ID NOs: 1-128. In aspects, more than one polypeptide may be used; for example, SEQ ID NOs: 121 and 128 for a heterodimer and may be used together in methods and compositions disclosed herein.

[0009] In some embodiments, the substrate steviol glycoside is rebaudioside A, or isomers thereof, and the glycosyltransferase polypeptide comprises, or consists of, an amino acid sequence selected from the group consisting of SEQ ID NOs: 1, 19, 29, 32, 41, 42, 43, 44, 45, 46, 47, 48, 49, 50, 51, 52, 53, 54, 55, 56, 58, 61, 65, 67, 68, 81, 87, 90, 91, 92, 93, 94, 95, 96, 97, 98, 99, 100, 101, 102, 105, 106, 116, 120, 122, and 127, and combinations thereof.

[0010] In some embodiments, the substrate steviol glycoside is rebaudioside D, or isomers thereof, and the glycosyltransferase polypeptide comprises, or consists of, an amino acid sequence selected from the group consisting of SEQ ID NOs: 2, 3, 22, 29, 39, 41, 42, 45, 49, 50, 51, 52, 53, 54, 55, 56, 62, 63, 72, 87, 90, 91, 94, 97, 98, 99, 100, 101, 102, 109, 110, 111, 112, 113, 115, 117, 118, 119, 121, 123, 124, 125, 126, 128, and combinations thereof.

[0011] In other embodiments, the substrate steviol glycoside is steviol, steviol-13-O-glucoside, steviol-19-O-glucoside, rubusoside, steviol-1,2-bioside, steviol-1,3-bioside, rubusoside, dulcoside B, dulcoside A, rebaudioside B, rebaudioside G, stevioside, rebaudioside C, rebaudioside F, rebaudioside A, rebaudioside I, rebaudioside E, rebaudioside H, rebaudioside L, rebaudioside K, rebaudioside J, rebaudioside M, rebaudioside D, rebaudioside N, rebaudioside O, rebaudioside Q, an isomer thereof, a synthetic steviol glycoside or combinations thereof.

[0012] In further embodiments, the non-UDP-sugar sugar donor is alpha-glucose-1-phosphate, beta-glucose-1-phosphate, cellobiose, sucrose, maltose, gentiobiose, trehalose, kojibiose, nigerose, isomaltose, beta-beta-trehalose, alpha-beta-trehalose, sophorose, laminaribiose, turanose, maltulose, palatinose, gentiobiulose, nigerotriose, maltotriose, melezitose, maltotriulose, kestose, starch, cellulose, glycogen, amylose, amylopectin, dextran, dextrin, maltodextrin, glucose syrup, cellodextrin, cyclodextrin, a non-UDP nucleotide sugar (e.g., ADP-glucose, GDP-glucose, CDP-glucose, TDP-glucose), or a steviol glycoside.

[0013] The present disclosure also provides a method for producing a target steviol glycoside composition, comprising the steps of: (a) providing a starting composition comprising greater than about 0.5%, about 1%, about 2%, about 3%, about 4%, about 5%, about 10%, about 20%, about 30%, about 40%, about 50%, about 60%, about 70%, about 80%, about 90%, about 92%, about 93%, about 94%, about 95%, about 96%, about 97%, about 98%, about 99%, or about 99.6% of a substrate steviol glycoside by weight on an anhydrous basis; (b) contacting the starting composition with a glycosyltransferase polypeptide and a non-UDP-sugar sugar donor; and (c) producing a target composition comprising a target steviol glycoside.

[0014] The method of the present disclosure teaches that the glycosyltransferase polypeptide comprises an amino acid sequence that is at least 60%, at least 65%, at least 70%, at least 75%, at least 80%, at least 85%, at least 90%, at least 95%, at least 98%, or at least 99% identical to an amino acid sequence selected from the group consisting of SEQ ID NOs: 1-128. The method of the present disclosure teaches the glycosyltransferase polypeptide comprises an amino acid sequence selected from the group consisting of SEQ ID NOs: 1-128.

[0015] In some embodiments, the target composition comprises greater than about 0.5%, about 1%, about 2%, about 3%, about 4%, about 5%, about 10%, about 20%, about 30%, about 40%, about 50%, about 60%, about 70%, about 80%, about 85%, about 90%, about 91%, about 92%, about 93%, about 94%, about 95%, about 96%, about 97%, about 98%, about 99%, about 99.6% of the target steviol glycoside by weight on an anhydrous basis.

[0016] In embodiments, the substrate steviol glycoside is rebaudioside A, or isomers thereof; and the target steviol glycoside is rebaudioside D, or isomers thereof. For example, the target steviol glycoside is a rebaudioside D isomer. In embodiments, the rebaudioside D isomer is rebaudioside D_1.07, rebaudioside D_0.77, rebaudioside D_1.21, rebaudioside D_1.25, or rebaudioside D_1.29. In embodiments, the target steviol glycoside is a rebaudioside M isomer. In further embodiments, the rebaudioside M isomer is rebaudioside M_0.66, rebaudioside M_0.80, rebaudioside M_0.92, rebaudioside M_1.06, rebaudioside M_1.11, rebaudioside M_1.17, or rebaudioside M_1.51. In other embodiments, the target steviol glycoside is a rebaudioside with 7 glucose moieties (rebaudioside M plus 1 glucose isomer; rebaudioside Mp1 isomer; rebMp1 isomer). In further embodiments, the rebaudioside Mp1 isomer is rebaudioside Mp1_0.62, rebaudioside Mp1_0.76, rebaudioside Mp1_0.82, rebaudioside Mp1_0.88, rebaudioside Mp1_0.94, rebaudioside Mp1_1.09, rebaudioside Mp1_1.14, rebaudioside Mp1_1.19, rebaudioside Mp1_1.27, rebaudioside Mp1_1.42, or rebaudioside Mp1_1.66.

[0017] In some embodiments, the substrate steviol glycoside is rebaudioside D, or isomers thereof; and the target steviol glycoside is rebaudioside M, or isomers thereof. In some embodiments, the target steviol glycoside is a rebaudioside M isomer. In some embodiments, the rebaudioside M isomer is rebaudioside M_0.66, rebaudioside M_0.80, rebaudioside M_0.92, rebaudioside M_1.06, rebaudioside M_1.11, rebaudioside M_1.17, or rebaudioside M_ 1.51. In other embodiments, the target steviol glycoside is a rebaudioside with 7 glucose moieties (rebaudioside M plus 1 glucose isomer; rebaudioside Mp1 isomer). In further embodiments, the rebaudioside Mp1 isomer is rebaudioside Mp1_0.62, rebaudioside Mp1_0.76, rebaudioside Mp1_0.82, rebaudioside Mp1_0.88, rebaudioside Mp1_0.94, rebaudioside Mp1_1.09, rebaudioside Mp1_1.14, rebaudioside Mp1_1.19, rebaudioside Mp1_1.27, rebaudioside Mp1_1.42, rebaudioside Mp1_1.66.

[0018] The present disclosure also provides a method for producing a target steviol glycoside composition, comprising the steps of: (a) providing a starting composition comprising greater than about 0.5%, about 1%, about 2%, about 3%, about 4%, about 5%, about 10%, about 20%, about 30%, about 40%, about 50%, about 60%, about 70%, about 80%, about 90%, about 92%, about 93%, about 94%, about 95%, about 96%, about 97%, about 98%, about 99%, or about 99.6% of a substrate steviol glycoside by weight on an anhydrous basis; (b) contacting the starting composition with a first glycosyltransferase polypeptide and a non-UDP-sugar sugar donor; (c) producing an intermediate composition comprising an intermediate target steviol glycoside; (d) contacting the intermediate composition with a second glycosyltransferase polypeptide and the non-UDP-sugar sugar donor; and (e) producing a target composition comprising a target steviol glycoside.

[0019] The method of the present disclosure teaches that the first glycosyltransferase polypeptide comprises an amino acid sequence that is at least 60%, at least 65%, at least 70%, at least 75%, at least 80%, at least 85%, at least 90%, at least 95%, at least 98%, or at least 99% identical to an amino acid sequence selected from the group consisting of SEQ ID NOs: 1-128. In some embodiments, the second glycosyltransferase polypeptide comprises an amino acid sequence that is at least 60%, at least 65%, at least 70%, at least 75%, at least 80%, at least 85%, at least 90%, at least 95%, at least 98%, or at least 99% identical to an amino acid sequence selected from the group consisting of SEQ ID NOs: 1-128. In some embodiments, the first glycosyltransferase polypeptide and the second glycosyltransferase polypeptide are identical. In some embodiments, the first glycosyltransferase polypeptide and the second glycosyltransferase polypeptide are different.

[0020] The present disclosure also provides a recombinant glycosyltransferase polypeptide comprising an amino acid sequence that is at least 60%, at least 65%, at least 70%, at least 75%, at least 80%, at least 85%, at least 90%, at least 95%, at least 98%, or at least 99% identical to an amino acid sequence selected from the group consisting of SEQ ID NOs: 1-128, or combinations thereof. The recombinant glycosyltransferase polypeptide may comprises an amino acid sequence that is at least 60% identical to an amino acid sequence selected from the group consisting of SEQ ID NOs: 2, 3, 22, 29, 39, 41, 42, 45, 49, 50, 51, 52, 53, 54, 55, 56, 62, 63, 72, 87, 90, 91, 94, 97, 98, 99, 100, 101, 102, 109, 110, 111, 112, 113, 115, 117, 118, 119, 121, 123, 124, 125, 126, and 128. In some embodiments, the recombinant glycosyltransferase polypeptide comprises an amino acid sequence that is at least 60% identical to an amino acid sequence selected from the group consisting of SEQ ID NOs: 1, 19, 29, 32, 41, 42, 43, 44, 45, 46, 47, 48, 49, 50, 51, 52, 53, 54, 55, 56, 58, 61, 65, 67, 68, 81, 87, 90, 91, 92, 93, 94, 95, 96, 97, 98, 99, 100, 101, 102, 105, 106, 116, 120, 122, and 127.

[0021] In some embodiments, the glycosyltransferase polypeptide comprises an amino acid sequence selected from the group consisting of SEQ ID NOs: 1-128. In other embodiments, the glycosyltransferase polypeptide comprises, or consists of, an amino acid sequence selected from the group consisting of SEQ ID NOs: 1, 19, 29, 32, 41, 42, 43, 44, 45, 46, 47, 48, 49, 50, 51, 52, 53, 54, 55, 56, 58, 61, 65, 67, 68, 81, 87, 90, 91, 92, 93, 94, 95, 96, 97, 98, 99, 100, 101, 102, 105, 106, 116, 120, 122, and 127. In other embodiments, the glycosyltransferase polypeptide comprises, or consists of, an amino acid sequence selected from the group consisting SEQ ID NOs: 2, 3, 22, 29, 39, 41, 42, 45, 49, 50, 51, 52, 53, 54, 55, 56, 62, 63, 72, 87, 90, 91, 94, 97, 98, 99, 100, 101, 102, 109, 110, 111, 112, 113, 115, 117, 118, 119, 121, 123, 124, 125, 126, and 128. In further embodiments, the glycosyltransferase polypeptide is capable of transferring a sugar moiety to a substrate steviol glycoside.

[0022] The present disclosure further provides a modified microorganism expressing a glycosyltransferase polypeptide comprises, or consists of, an amino acid sequence that is at least 60%, at least 65%, at least 70%, at least 75%, at least 80%, at least 85%, at least 90%, at least 95%, at least 98%, or at least 99% identical to an amino acid sequence selected from the group consisting of SEQ ID NOs: 1-128. The modified microorganism of the present disclosure teaches that the glycosyltransferase polypeptide comprises, or consists of, an amino acid sequence that is at least 60% identical to an amino acid sequence selected from the group consisting of SEQ ID NOs: 2, 3, 22, 29, 39, 41, 42, 45, 49, 50, 51, 52, 53, 54, 55, 56, 62, 63, 72, 87, 90, 91, 94, 97, 98, 99, 100, 101, 102, 109, 110, 111, 112, 113, 115, 117, 118, 119, 121, 123, 124, 125, 126, and 128. In some embodiments, the glycosyltransferase polypeptide comprises, or consists of, an amino acid sequence selected from the group consisting of SEQ ID NOs: 1-128. In other embodiments, the glycosyltransferase polypeptide comprises, or consists of, an amino acid sequence selected from the group consisting of SEQ ID NOs: 2, 3, 22, 29, 39, 41, 42, 45, 49, 50, 51, 52, 53, 54, 55, 56, 62, 63, 72, 87, 90, 91, 94, 97, 98, 99, 100, 101, 102, 109, 110, 111, 112, 113, 115, 117, 118, 119, 121, 123, 124, 125, 126, and 128. In further embodiments, the glycosyltransferase polypeptide is capable of transferring a sugar moiety to a substrate steviol glycoside.

### BRIEF DESCRIPTION OF THE DRAWINGS

[0023] The accompanying drawings are included to provide a further understanding of the disclosure. The drawings illustrate embodiments of the disclosure and together with the description serve to explain the principles of the embodiments of the disclosure.

[0024] FIG. 1 shows the conversion (glycosylation) of rebaudioside A (rebA) to rebaudioside D (rebD).

[0025] FIG. 2 shows the conversion (glycosylation) of rebD to rebaudioside M (rebM).

[0026] FIG. 3 shows an LC/MS trace of an enzyme that converts rebA to rebD_0.77. In this figure, the glucosyltransferase is used to glycosylate rebA to rebD_0.77 using maltose as the sugar donor.

[0027] FIG. 4 shows an LC/MS trace of an enzyme that converts rebA to rebD_1.07. In this figure, the glucosyltransferase is used to glycosylate rebA to rebD_1.07 using alpha-glucose1-phosphate as the sugar donor.

[0028] FIG. 5 shows an LC/MS trace of an enzyme that converts rebA to rebD_1.21. In this figure, the glucosyltransferase is used to glycosylate rebA to rebD_1.21 using maltose as the sugar donor.

[0029] FIG. 6 shows an LC/MS trace of an enzyme that converts rebA to rebD_1.25. In this figure, the glucosyltransferase is used to glycosylate rebA to rebD_1.25 using maltose as the sugar donor.

[0030] FIG. 7 shows an LC/MS trace of an enzyme that converts rebA to rebD_1.29. In this figure, the glucosyltransferase is used to glycosylate rebA to rebD_1.29 using maltose as the sugar donor.

[0031] FIG. 8 shows an LC/MS trace of an enzyme that converts rebA to rebM_0.66. In this figure, the glucosyltransferase is used to glycosylate rebA to rebM_0.66 using maltose as the sugar donor.

[0032] FIG. 9 shows an LC/MS trace of an enzyme that converts rebD to rebM_0.80. In this figure, the glucosyltransferase is used to glycosylate rebD to rebM_0.80 using maltose as the sugar donor.

[0033] FIG. 10 shows an LC/MS trace of an enzyme that converts rebA to rebM_0.92. In this figure, the glucosyltransferase is used to glycosylate rebA to rebM_0.92 using sucrose as the sugar donor.

[0034] FIG. 11 shows an LC/MS trace of an enzyme that converts rebA to rebM_1.06. In this figure, the glucosyltransferase is used to glycosylate rebA to rebM_1.06 using maltose as the sugar donor.

[0035] FIG. 12 shows an LC/MS trace of an enzyme that converts rebA to rebM_1.11. In this figure, the glucosyltransferase is used to glycosylate rebA to rebM_1.11 using maltose as the sugar donor.

[0036] FIG. 13 shows an LC/MS trace of an enzyme that converts rebA to rebM_1.17. In this figure, the glucosyltransferase is used to glycosylate rebA to rebM_1.17 using maltose as the sugar donor.

[0037] FIG. 14 shows an LC/MS trace of an enzyme that converts rebA to rebM_1.51. In this figure, the glucosyltransferase is used to glycosylate rebA to rebM_1.51 using gentiobiose as the sugar donor.

[0038] FIG. 15 shows the production of RebD_1.29 by contacting the polypeptide encoded in pA10147 (SEQ NO: 55) with RebA.

[0039] FIG. 16 shows the production of RebM by contacting the polypeptide encoded in pA10147 (SEQ NO: 55) with RebD.

[0040] FIG. 17 shows the production of RebD_1.07 by contacting the polypeptide encoded in pA10154 (SEQ NO: 42) with increasing concentration of RA50 feed.

[0041] FIG. 18 shows the production of RebM_0.66, RebM_0.80 and RebM_0.92 from RebD by several discovered glycosyltransferases.

### DETAILED DESCRIPTION

[0042] The present disclosure provides enzymes and a biocatalytic process for preparing a composition comprising a target steviol glycoside by contacting a starting composition comprising a substrate steviol glycoside with a non-UDP-sugar glucosyltransferase polypeptide, thereby producing a composition comprising a target steviol glycoside comprising one or more additional glucose units than the substrate steviol glycoside.

[0043] The starting composition can be any composition comprising at least one substrate steviol glycoside. In one embodiment, the substrate steviol glycoside is selected from the group consisting of steviol, steviol-13-O-glucoside, steviol-19-O-glucoside, rubusoside, steviol-1,2bioside, steviol-1,3-bioside, rubusoside, dulcoside B, dulcoside A, rebaudioside B, rebaudioside G, stevioside, rebaudioside C, rebaudioside F, rebaudioside A, rebaudioside I, rebaudioside E, rebaudioside H, rebaudioside L, rebaudioside K, rebaudioside J, rebaudioside M, rebaudioside D, rebaudioside N, rebaudioside O, rebaudioside Q, an isomer thereof, a synthetic steviol glycoside or combinations thereof. The starting composition may be commercially available or prepared. The starting composition may comprise a purified substrate steviol glycoside or a partially purified steviol glycoside substrate.

[0044] In one embodiment, the substrate steviol glycoside is stevioside. In another embodiment, the substrate steviol glycoside is rebaudioside A, or isomers thereof. In still another embodiment, the substrate steviol glycoside is rebaudioside D, or isomers thereof.

[0045] The target steviol glycoside can be any known steviol glycoside. In one embodiment, the target steviol glycoside is steviol-13-O-glucoside, steviol-19-O-glucoside, rubusoside, steviol-1,2-bioside, steviol-1,3-bioside, rubusoside, dulcoside B, dulcoside A, rebaudioside B, rebaudioside G, stevioside, rebaudioside C, rebaudioside F, rebaudioside A, rebaudioside I, rebaudioside E, rebaudioside H, rebaudioside L, rebaudioside K, rebaudioside J, rebaudioside M, rebaudioside D, rebaudioside N, rebaudioside O, rebaudioside Q, a rebaudioside with 7 covalently attached glucose units (e.g. rebaudioside M plus 1 glucose unit), a synthetic steviol glycoside, an isomer thereof, and/or a steviol glycoside composition.

[0046] In embodiments, the target steviol glycoside is rebaudioside A, or isomers thereof, rebaudioside D, or isomers thereof, or rebaudioside M, or isomers thereof. Rebaudioside Mp1 (“M plus one”) are obtained by adding a glucose unit to rebaudioside M or a rebaudioside M isomer.

[0047] Rebaudioside isomers may be defined and identified according to their relative retention time compared to a rebaudioside standard. The relative retention time is calculated by dividing the absolute retention time of the isomer by the absolute retention time of the standard rebaudioside molecule. The isomer rebaudioside D_1.29 has a relative retention time of 1.29 compared to rebaudioside D. Similarly, the isomer rebaudioside M_0.66 has a relative retention time of 0.66 compared to the rebaudioside M retention time. The isomer rebaudioside Mp1_0.62 has a relative retention time of 0.62 compared to the rebaudioside D standard. Experimental conditions for identifying rebaudioside D isomers, rebaudioside M isomers and rebaudioside Mp1 isomers are provided in Example 4 and Example 16.

[0048] The intermediate and target rebaudioside isomers in methods and compositions disclosed herein include one or more of rebaudioside D_0.77, rebaudioside D_1.07, rebaudioside D_1.21, rebaudioside D_1.25, rebaudioside D_1.29, rebaudioside M_0.66, rebaudioside M_0.80, rebaudioside M_0.92, rebaudioside M_1.06, rebaudioside M_1.11, rebaudioside M_1.17, rebaudioside M_1.51, rebaudioside Mp1_0.62, rebaudioside Mp1_0.76, rebaudioside Mp1_0.82, rebaudioside Mp1_0.88, rebaudioside Mp1_0.94, rebaudioside Mp1_1.09, rebaudioside Mp1_1.14, rebaudioside Mp1_1.19, rebaudioside Mp1_1.27, rebaudioside Mp1_1.42, rebaudioside Mp1_1.66.

[0049] The glycosyltransferase polypeptide can be any glucosyltransferase capable of adding at least one glucose unit to the substrate steviol glycoside to provide the target steviol glycoside using a non-UDP-sugar sugar source. In one embodiment, the non-UDP-sugar glucosyltransferase polypeptide is expressed in a host microorganism. The host may be, for example, E. coli, Saccharomyces sp., Aspergillus sp., Pichia sp., Bacillus sp. In another embodiment, the glycosyltransferase polypeptide is synthesized.

[0050] The glycosyltransferase polypeptide can be provided in any suitable form, including free, immobilized or as a whole cell system. The degree of purity of the glucosyltransferase polypeptide may vary, e.g., it may be provided as a crude, semi-purified or purified enzyme preparation(s).

[0051] In one embodiment, the glycosyltransferase polypeptide is free. In another embodiment, the glycosyltransferase polypeptide is immobilized to a solid support, for example on an inorganic or organic support. In some embodiments, the solid support is derivatized cellulose, glass, ceramic, methacrylate, styrene, acrylic, a metal oxide, or a membrane. In some embodiments, the glucosyltransferase polypeptide is immobilized to the solid support by covalent attachment, adsorption, cross-linking, entrapment, or encapsulation.

[0052] In yet another embodiment, the glycosyltransferase polypeptide is provided in the form of a whole cell system, for example as a living fermentative microbial cell, or as dead and stabilized microbial cell, or in the form of a cell lysate.

[0053] In one embodiment, the glucosyltransferase polypeptide is any glucosyltransferase capable of adding at least one glucose unit to rebA to form rebD or a rebD isomer using a non-UDP-sugar sugar donor. In a particular embodiment, the glucosyltransferase polypeptide is one of SEQ ID NOs: 1, 19, 29, 32, 41, 42, 43, 44, 45, 46, 47, 48, 49, 50, 51, 52, 53, 54, 55, 56, 58, 61, 65, 67, 68, 81, 87, 90, 91, 92, 93, 94, 95, 96, 97, 98, 99, 100, 101, 102, 105, 106, 116, 120, 122, and 127. In another embodiment, the glucosyltransferase polypeptide is a polypeptide sequence that is at least 60%, 65%, 70%, 75%, 80%, 85%, 86%, 87%, 88%, 89%, 90%, 91%, 92%, 93%, 94%, 95%, 96%, 97%, 98%, 99%, or more sequence identity to one of SEQ ID NOs: 1, 19, 29, 32, 41, 42, 43, 44, 45, 46, 47, 48, 49, 50, 51, 52, 53, 54, 55, 56, 58, 61, 65, 67, 68, 81, 87, 90, 91, 92, 93, 94, 95, 96, 97, 98, 99, 100, 101, 102, 105, 106, 116, 120, 122, and 127.

[0054] Percentage identity may be calculated using the alignment program Clustal Omega (available at /www.ebi.ac.uk/Tools/msa/clustalo/) default settings. The default transition matrix is Gonnet, gap opening penalty is 6 bits, gap extension is 1 bit. Clustal Omega uses the HHalign algorithm and its default settings as its core alignment engine. The algorithm is described in Soding, J. (2005) ‘Protein homology detection by HMM-HMM comparison’. Bioinformatics 21, 951-960.

[0055] In one embodiment, the glucosyltransferase polypeptide is any glucosyltransferase capable of adding at least one glucose unit to rebD or a rebD isomer to form rebM or a rebM isomer using a non-UDP-sugar sugar donor. In a particular embodiment, the glucosyltransferase polypeptide is one of SEQ ID NOs: 2, 3, 22, 29, 39, 41, 42, 45, 49, 50, 51, 52, 53, 54, 55, 56, 62, 63, 72, 87, 90, 91, 94, 97, 98, 99, 100, 101, 102, 109, 110, 111, 112, 113, 115, 117, 118, 119, 121, 123, 124, 125, 126, and 128. In another embodiment, the glucosyltransferase polypeptide is a polypeptide sequence that is at least 60%, 65%, 70%, 75%, 80%, 85%, 86%, 87%, 88%, 89%, 90%, 91%, 92%, 93%, 94%, 95%, 96%, 97%, 98%, 99%, or more sequence identity to one of SEQ ID NOs: SEQ ID NOs: 2, 3, 22, 29, 39, 41, 42, 45, 49, 50, 51, 52, 53, 54, 55, 56, 62, 63, 72, 87, 90, 91, 94, 97, 98, 99, 100, 101, 102, 109, 110, 111, 112, 113, 115, 117, 118, 119, 121, 123, 124, 125, 126, and 128.

[0056] Plasmids containing nucleic acids encoding enzymes having SEQ ID NOS:1-128 are described in the table below.

| Plasmid ID | SEQ ID NO: |
|---|---|
| pA10225 | 1 |
| pA10143 | 2 |
| pA10080 | 3 |
| pA10135 | 4 |
| pA10139 | 5 |
| pA10170 | 6 |
| pA10122 | 7 |
| pA10260 | 8 |
| pA10113 | 9 |
| pA10180 | 10 |
| pA10163 | 11 |
| pA10141 | 12 |
| pA10181 | 13 |
| pA10231 | 14 |
| pA10243 | 15 |
| pA10172 | 16 |
| pA10108 | 17 |
| pA10263 | 18 |
| pA10251 | 19 |
| pA10118 | 20 |
| pA10223 | 21 |
| pA10082 | 22 |
| pA10157 | 23 |
| pA10206 | 24 |
| pA10166 | 25 |
| pA10192 | 26 |
| pA10081 | 27 |
| pA10204 | 28 |
| pA10085 | 29 |
| pA10177 | 30 |
| pA10121 | 31 |
| pA10105 | 32 |
| pA10209 | 33 |
| pA10216 | 34 |
| pA10123 | 35 |
| pA10221 | 36 |
| pA10140 | 37 |
| pA10134 | 38 |
| pA10109 | 39 |
| pA10131 | 40 |
| pA10174 | 41 |
| pA10154 | 42 |
| pA10152 | 43 |
| pA10151 | 44 |
| pA10076 | 45 |
| pA10155 | 46 |
| pA10072 | 47 |
| pA10265 | 48 |
| pA10074 | 49 |
| pA10075 | 50 |
| pA10194 | 51 |
| pA10176 | 52 |
| pA10078 | 53 |
| pA10073 | 54 |
| pA10147 | 55 |
| pA10158 | 56 |
| pA10116 | 57 |
| pA10262 | 58 |
| pA10203 | 59 |
| pA10266 | 60 |
| pA10149 | 61 |
| pA10197 | 62 |
| pA10195 | 63 |
| pA10212 | 64 |
| pA10115 | 65 |
| pA10211 | 66 |
| pA12546 | 67 |
| pA10114 | 68 |
| pA10162 | 69 |
| pA10126 | 70 |
| pA10125 | 71 |
| pA10080 | 72 |
| pA10122 | 73 |
| pA10260 | 74 |
| pA10113 | 75 |
| pA10163 | 76 |
| pA10181 | 77 |
| pA10231 | 78 |
| pA10243 | 79 |
| pA10263 | 80 |
| pA10251 | 81 |
| pA10118 | 82 |
| pA10157 | 83 |
| pA10206 | 84 |
| pA10166 | 85 |
| pA10204 | 86 |
| pA10085 | 87 |
| pA10209 | 88 |
| pA10123 | 89 |
| pA10174 | 90 |
| pA10154 | 91 |
| pA10152 | 92 |
| pA10151 | 93 |
| pA10076 | 94 |
| pA10155 | 95 |
| pA10072 | 96 |
| pA10074 | 97 |
| pA10075 | 98 |
| pA10194 | 99 |
| pA10176 | 100 |
| pA10078 | 101 |
| pA10073 | 102 |
| pA10203 | 103 |
| pA10266 | 104 |
| pA10149 | 105 |
| pA10115 | 106 |
| pA10162 | 107 |
| pA10125 | 108 |
| pA10112 | 109 |
| pA10213 | 110 |
| pA10175 | 111 |
| pA10117 | 112 |
| pA10259 | 113 |
| pA10190 | 114 |
| pA10098 | 115 |
| pA10188 | 116 |
| pA10189 | 117 |
| pA10160 | 118 |
| pA10084 | 119 |
| pA10185 | 120 |
| pA10273* | 121 |
| pA10224 | 122 |
| pA10175 | 123 |
| pA10259 | 124 |
| pA10098 | 125 |
| pA10160 | 126 |
| pA10224 | 127 |
| pA10273* | 128 |

*pA10273 encodes two proteins that form a heterodimer. SEQ ID NO: 121 and SEQ ID NO: 128 are the monomer sequences.

[0057] The term “non-UDP-sugar sugar donor” is used to refer to any glycoside, disaccharide, oligosaccharide, or polysaccharide that contains at least one glucose unit. In one embodiment, the non-UDP-sugar sugar donor is a non-nucleotide-sugar sugar donor.

[0058] In one embodiment, the non-UDP-sugar sugar donor is alpha-glucose-1-phosphate. Preferably, alpha-glucose-1-phosphate is generated in situ from an oligo- or poly-saccharide such as starch, sucrose, maltose, cellobiose or gentiobiose by an oligo- or poly-saccharide kinase. In another embodiment, the non-UDP-sugar sugar donor is maltose, cellobiose, beta-glucose-1-phosphate, sucrose, gentiobiose, trehalose, kojibiose, nigerose, isomaltose, beta-beta-trehalose, alpha-beta-trehalose, sophorose, laminaribiose, turanose, maltulose, palatinose, gentiobiulose, another disaccharide, nigerotriose, maltotriose, melezitose, maltotriulose, kestose, starch, cellulose, glycogen, amylose, amylopectin, dextran, dextrin, maltodextrin, glucose syrup, cellodextrin, cyclodextrin, or a steviol glycoside. In some embodiments, the non-UDP-sugar sugar donor is not alpha-glucose-1-phosphate. In some embodiments, the non-UDP-sugar sugar donor is not beta-glucose-1-phosphate.

[0059] Optionally, the method of the present disclosure further comprises separating the target steviol glycoside from the target composition. The target steviol glycoside can be separated by any suitable method, such as, for example, crystallization, separation by membranes, centrifugation, extraction, chromatographic separation or a combination of such methods.

[0060] In one embodiment, separation produces a composition comprising greater than about 80% by weight of the target steviol glycoside on an anhydrous basis, i.e., a highly purified steviol glycoside composition. In another embodiment, separation produces a composition comprising greater than about 0.5%, about 1%, about 2%, about 3%, about 4%, about 5%, about 10%, about 20%, about 30%, about 40%, about 50%, about 60%, about 70%, about 80%, about 85%, about 90%, about 91%, about 92%, about 93%, about 94%, about 95%, about 96%, about 97%, about 98%, about 99%, about 99.6% by weight of the target steviol glycoside. In particular embodiments, the composition comprises greater than about 95% by weight of the target steviol glycoside.

[0061] In another embodiment, contacting the glucosyltransferase polypeptide with a stevia plant extract produces a composition containing multiple steviosides, including Reb A, Reb D Reb M, Reb A isomers, RebD isomer, and Reb M isomers, but enriched in Reb D, Reb M, Reb D isomers and Reb M isomers to more than 1%, ideally more than 2%, 3%, 4%, 5%, 6%, 7%, 8%, 9%, or more than 10%.

[0062] The target steviol glycoside can be in any polymorphic or amorphous form, including hydrates, solvates, anhydrous or combinations thereof.

[0063] Purified target steviol glycosides can be used in consumable products as a sweetener. Suitable consumer products include, but are not limited to, food, beverages, pharmaceutical compositions, tobacco products, nutraceutical compositions, oral hygiene compositions, and cosmetic compositions.

[0064] The present disclosure provides a biocatalytic process for the preparation of a composition comprising a target steviol glycoside from a starting composition comprising a substrate steviol glycoside, wherein the target steviol glycoside comprises one or more additional glucose units than the substrate steviol glycoside.

[0065] One object of the disclosure is to provide an efficient biocatalytic method for preparing steviol glycosides, particularly reb D, reb D isomers, reb M and reb M isomers, and rebMp1 isomers from other steviol glycosides and/or mixtures thereof.

[0066] As used herein, “biocatalysis” or “biocatalytic” refers to the use of natural catalysts, such as protein enzymes, to perform chemical transformations on organic compounds. Biocatalysis is alternatively known as biotransformation or biosynthesis. Both isolated and whole-cell biocatalysis methods are known in the art. Biocatalyst protein enzymes can be naturally occurring or recombinant proteins.

[0067] As used herein, the term “steviol glycoside(s)” refers to a glycoside of steviol, including, but not limited to, naturally occurring steviol glycosides, e.g. steviol-13-O-glucoside, steviol-19-O-glucoside, rubusoside, steviol-1,2-bioside, steviol-1,3-bioside, rubusoside, dulcoside B, dulcoside A, rebaudioside B, rebaudioside G, stevioside, rebaudioside C, rebaudioside F, rebaudioside A, rebaudioside I, rebaudioside E, rebaudioside H, rebaudioside L, rebaudioside K, rebaudioside J, rebaudioside M, rebaudioside D, rebaudioside N, rebaudioside O, rebaudioside Q, synthetic steviol glycosides, e.g. enzymatically glucosylated steviol glycosides and combinations thereof.

### Substrate Steviol Glycoside and Starting Composition

[0068] As used herein, “starting composition” refers to any composition (generally an aqueous solution) containing one or more steviol glycosides, where the one or more steviol glycosides serve as the substrate for the biotransformation.

[0069] In one embodiment, the starting composition comprises one or more substrate steviol glycosides selected from the group consisting of steviol, steviol-13-O-glucoside, steviol-19-O-glucoside, rubusoside, steviol-1,2-bioside, steviol-1,3-bioside, rubusoside, dulcoside B, dulcoside A, rebaudioside B, rebaudioside G, stevioside, rebaudioside C, rebaudioside F, rebaudioside A, rebaudioside I, rebaudioside E, rebaudioside H, rebaudioside L, rebaudioside K, rebaudioside J, rebaudioside M, rebaudioside D, rebaudioside N, rebaudioside O, rebaudioside Q, synthetic steviol glycosides, e.g. enzymatically glucosylated steviol glycosides and combinations thereof.

[0070] In one embodiment, the starting composition comprises the substrate steviol glycoside, stevioside. In one embodiment, the starting composition comprises the substrate steviol glycoside, reb A, or isomers thereof. In one embodiment, the starting composition comprises the substrate steviol glycoside, reb D, or isomers thereof.

[0071] The starting composition may be synthetic or purified (partially or entirely), commercially available or prepared. One example of a starting composition useful in the method of the present disclosure is an extract obtained from purification of Stevia rebaudiana plant material (e.g. leaves). Another example of a starting composition is a commercially available stevia extract brought into solution with a solvent. Yet another example of a starting composition is a commercially available mixture of steviol glycosides brought into solution with a solvent. Other suitable starting compositions include by-products of processes to isolate and purify steviol glycosides.

[0072] In one embodiment, the starting composition comprises a purified substrate steviol glycoside. For example, the starting composition may comprise greater than about 50%, about 60%, about 70%, about 80%, about 85%, about 90%, about 91%, about 92%, about 93%, about 94%, about 95%, about 96%, about 97%, about 98%, about 99%, or about 99.6% of a particular substrate steviol glycoside by weight on an anhydrous basis.

[0073] In another embodiment, the starting composition comprises a partially purified substrate steviol glycoside composition. For example, the starting composition contains greater than about 0.5%, about 1%, about 2%, about 3%, about 4%, about 5%, about 10%, about 20%, about 30%, about 40%, or about 50%, of a particular substrate steviol glycoside by weight on an anhydrous basis.

[0074] In another embodiment, the starting composition comprises purified rebaudioside A, or isomers thereof. In a particular embodiment, the starting composition contains greater than about 99% rebaudioside A, or isomers thereof, by weight on an anhydrous basis. In another embodiment, the starting composition comprises partially purified rebaudioside A. In a particular embodiment, the starting composition contains greater than about 50%, about 60%, about 70%, about 80% or about 90% rebaudioside A by weight on an anhydrous basis.

[0075] In yet another embodiment, the starting composition comprises purified rebaudioside D, or isomers thereof. In a particular embodiment, the starting composition contains greater than about 99% rebaudioside D, or isomers thereof, by weight on an anhydrous basis. In another embodiment, the starting composition comprises partially purified rebaudioside D. In a particular embodiment, the starting composition contains greater than about 50%, about 60%, about 70%, about 80% or about 90% rebaudioside D by weight on an anhydrous basis.

[0076] The steviol glycoside component(s) of the starting composition serve as a substrate(s) for the production of the target steviol glycoside(s), as described herein. The target steviol glycoside target(s) differs chemically from its corresponding substrate steviol glycoside(s) by the addition of one or more glucose units.

### Intermediate Target Steviol Glycoside, Target Steviol Glycoside, and Target Composition

[0077] The intermediate target steviol glycoside and/or target steviol glycoside of the present method can be any steviol glycoside that can be prepared by the methods disclosed herein. In one embodiment, the intermediate target steviol glycoside and/or target steviol glycoside is selected from the group consisting of steviol-13-O-glucoside, steviol-19-O-glucoside, rubusoside, steviol-1,2-bioside, steviol-1,3-bioside, rubusoside, dulcoside B, dulcoside A, rebaudioside B, rebaudioside G, stevioside, rebaudioside C, rebaudioside F, rebaudioside A, rebaudioside I, rebaudioside E, rebaudioside H, rebaudioside L, rebaudioside K, rebaudioside J, rebaudioside M, rebaudioside D, rebaudioside N, rebaudioside O, rebaudioside Q, isomers of these steviol glycosides or rebaudioside Mp1 isomers.

[0078] In one embodiment, the intermediate target steviol glycoside and/or target steviol glycoside is rebaudioside D (reb D). In another embodiment, the intermediate target steviol glycoside and/or target steviol glycoside is a reb D isomer. In yet another embodiment, the intermediate target steviol glycoside and/or the target steviol glycoside is rebaudioside M (rebM). In still another embodiment, the intermediate target steviol glycoside and/or the target steviol glycoside is a reb M isomer. In still another embodiment, the intermediate target steviol glycoside and/or the target steviol glycoside is a rebMp1 isomer.

[0079] In another embodiment, the intermediate target steviol glycoside and/or target steviol glycoside is rebaudioside D, or isomers thereof. In still another embodiment, the intermediate target steviol glycoside and/or the target steviol glycoside is rebaudioside M, or isomers thereof. In still another embodiment, the intermediate target steviol glycoside and/or the target steviol glycoside is a rebaudioside Mp1 isomer. In yet another embodiment, the intermediate target steviol glycoside and/or the target steviol glycoside is rebaudioside D_0.77. In yet another embodiment, the intermediate target steviol glycoside and/or the target steviol glycoside is rebaudioside D_1.07. In yet another embodiment, the intermediate target steviol glycoside and/or the target steviol glycoside is rebaudioside D_1.21. In yet another embodiment, the intermediate target steviol glycoside and/or the target steviol glycoside is rebaudioside D_1.25. In yet another embodiment, the intermediate target steviol glycoside and/or the target steviol glycoside is rebaudioside D_1.29.

[0080] In yet another embodiment, the intermediate target steviol glycoside and/or the target steviol glycoside is rebaudioside M_0.66. In yet another embodiment, the target steviol glycoside is rebaudioside M_0.80. In yet another embodiment, the intermediate target steviol glycoside and/or the target steviol glycoside is rebaudioside M_0.92. In yet another embodiment, the intermediate target steviol glycoside and/or the target steviol glycoside is rebaudioside M_1.06. In yet another embodiment, the intermediate target steviol glycoside and/or the target steviol glycoside is rebaudioside M_1.11. In yet another embodiment, the intermediate target steviol glycoside and/or the target steviol glycoside is rebaudioside M_1.17. In yet another embodiment, the intermediate target steviol glycoside and/or the target steviol glycoside is rebaudioside M_1.51.

[0081] In yet another embodiment, the intermediate target steviol glycoside and/or the target steviol glycoside is rebaudioside Mp1_0.62. In yet another embodiment, the intermediate target steviol glycoside and/or the target steviol glycoside is rebaudioside Mp1_0.76. In yet another embodiment, the intermediate target steviol glycoside and/or the target steviol glycoside is rebaudioside Mp1_0.82. In yet another embodiment, the intermediate target steviol glycoside and/or the target steviol glycoside is rebaudioside Mp1_0.88. In yet another embodiment, the intermediate target steviol glycoside and/or the target steviol glycoside is rebaudioside Mp1_0.94. In yet another embodiment, the intermediate target steviol glycoside and/or the target steviol glycoside is rebaudioside Mp1_1.09. In yet another embodiment, the intermediate target steviol glycoside and/or the target steviol glycoside is rebaudioside Mp1_1.14. In yet another embodiment, the intermediate target steviol glycoside and/or the target steviol glycoside is rebaudioside Mp1_1.19. In yet another embodiment, the intermediate target steviol glycoside and/or the target steviol glycoside is rebaudioside Mp1_1.27. In yet another embodiment, the intermediate target steviol glycoside and/or the target steviol glycoside is rebaudioside Mp1_1.42. In yet another embodiment, the intermediate target steviol glycoside and/or the target steviol glycoside is rebaudioside Mp1_1.66.

[0082] The rebaudioside isomers are defined and identified according to their relative retention times compared to a rebaudioside standard. The relative retention time for rebaudioside D isomers and rebaudioside Mp1 isomers are calculated with respect to the measured rebaudioside D retention time. The relative retention time for rebaudioside M isomers are calculated with respect to the measured rebaudioside M retention time. To account for experimental noise, rebaudioside isomers are classified as a specific isomer if the relative retention time falls within a specified range of the target relative retention time.

[0083] Rebaudioside isomers were classified by calculating relative retention times for all rebaudioside isomers detected by the method described in Example 4 (the 4-minute method) and the method described in Example 16 (the 20-minute method). Due to differences in the chromatography gradient between the 4-minute and 20-minute method, the relative retention times for the same isomer could differ between the two methods. Therefore, for some isomers, slightly different relative retention time ranges were used to classify a rebaudioside isomer measured by the 4-minute method versus the 20-minute method.

[0084] Rebaudioside D_0.77 is defined as an isomer of rebaudioside D with a relative retention time greater than 0.75 and less than 0.95 compared to the rebaudioside D standard when measured with the 4-minute method or 20-minute method. Rebaudioside D_1.07 is defined as an isomer of rebaudioside D with a relative retention time greater than 1.05 and less than 1.15 compared to the rebaudioside D standard when measured with the 4-minute method or 20-minute method. Rebaudioside D_1.21 is defined as an isomer of rebaudioside D with a relative retention time greater than 1.20 and less than 1.24 compared to the rebaudioside D standard when measured with the 4-minute method and a relative retention time greater than 1.3 and less than 1.4 when measured with the 20-minute method. Rebaudioside D_1.25 is defined as an isomer of rebaudioside D with a relative retention time greater than 1.24 and less than 1.26 compared to the rebaudioside D standard when measured with the 4-minute method and a relative retention time greater than 1.4 and less than 1.45 when measured with the 20-minute method. Rebaudioside D_1.29 is defined as an isomer of rebaudioside D with a relative retention time greater than 1.26 and less than 1.32 compared to the rebaudioside D standard when measured with the 4-minute method and a relative retention time greater than 1.45 and less than 1.6 when measured with the 20-minute method.

[0085] Rebaudioside M_0.66 is defined as an isomer of rebaudioside M with a relative retention time greater than 0.6 and less than 0.7 relative to the rebaudioside M standard when measured with the 4-minute method or 20-minute method. Rebaudioside M_0.80 is defined as an isomer of rebaudioside M with a relative retention time greater than 0.7 and less than 0.9 relative to the rebaudioside M standard when measured by the 4-minute method and a relative retention time greater than 0.7 and less than 0.82 when measured with the 20-minute method. Rebaudioside M_0.80 is defined as an isomer of rebaudioside M with a relative retention time greater than 0.7 and less than 0.9 relative to the rebaudioside M standard when measured by the 4-minute method and a relative retention time greater than 0.7 and less than 0.82 when measured with the 20-minute method. Rebaudioside M_0.92 is defined as an isomer of rebaudioside M with a relative retention time greater than 0.9 and less than 0.98 relative to the rebaudioside M standard when measured by the 4-minute method and a relative retention time greater than 0.82 and less than 0.98 when measured with the 20-minute method. Rebaudioside M_1.06 is defined as an isomer of rebaudioside M with a relative retention time greater than 1.04 and less than 1.08 relative to the rebaudioside M standard when measured by the 4-minute method and a relative retention time greater than 1.04 and less than 1.15 when measured with the 20-minute method. Rebaudioside M_1.11 is defined as an isomer of rebaudioside M with a relative retention time greater than 1.10 and less than 1.13 relative to the rebaudioside M standard when measured by the 4-minute method and a relative retention time greater than 1.15 and less than 1.25 when measured with the 20-minute method. Rebaudioside M_1.17 is defined as an isomer of rebaudioside M with a relative retention time greater than 1.15 and less than 1.2 relative to the rebaudioside M standard when measured by the 4-minute method and a relative retention time greater than 1.25 and less than 1.35 when measured with the 20-minute method. Rebaudioside M_1.51 is defined as an isomer of rebaudioside M with a relative retention time greater than 1.4 and less than 1.6 relative to the rebaudioside M standard when measured with the 4-minute method or 20-minute method.

[0086] Rebaudioside Mp1_0.62 is defined as a rebaudioside with seven glucose units (i.e. a rebaudioside made by adding a glucose unit to rebaudioside M or a rebaudioside M isomer) with a relative retention time greater than 0.59 and less than 0.68 when measured with the 4-minute method or 20-minute method. Rebaudioside Mp1_0.76 is defined as a rebaudioside with seven glucose units with a relative retention time greater than 0.68 and less than 0.79 when measured with the 4-minute method or 20-minute method. Rebaudioside Mp1_0.82 is defined as a rebaudioside with seven glucose units with a relative retention time greater than 0.79 and less than 0.87 when measured with the 4-minute method or 20-minute method. Rebaudioside Mp1_0.88 is defined as a rebaudioside with seven glucose units with a relative retention time greater than 0.88 and less than 0.91 when measured with the 4-minute method or 20-minute method. Rebaudioside Mp1_0.94 is defined as a rebaudioside with seven glucose units with a relative retention time greater than 0.91 and less than 0.98 when measured with the 4-minute method or 20-minute method. Rebaudioside Mp1_1.09 is defined as a rebaudioside with seven glucose units with a relative retention time greater than 1.04 and less than 1.11 when measured with the 4-minute method or 20-minute method. Rebaudioside Mp1_1.14 is defined as a rebaudioside with seven glucose units with a relative retention time greater than 1.11 and less than 1.17 when measured with the 4-minute method or 20-minute method. Rebaudioside Mp1_1.19 is defined as a rebaudioside with seven glucose units with a relative retention time greater than 1.17 and less than 1.24 when measured with the 4-minute method or 20-minute method. Rebaudioside Mp1_1.27 is defined as a rebaudioside with seven glucose units with a relative retention time greater than 1.24 and less than 1.34 when measured with the 4-minute method or 20-minute method. Rebaudioside Mp1_1.42 is defined as a rebaudioside with seven glucose units with a relative retention time greater than 1.34 and less than 1.45 when measured with the 4-minute method or 20-minute method. Rebaudioside Mp1_1.66 is defined as a rebaudioside with seven glucose units with a relative retention time greater than 1.43 and less than 1.82 when measured with the 4-minute method or 20-minute method.

[0087] The target steviol glycoside can be in any polymorphic or amorphous form, including hydrates, solvates, anhydrous or combinations thereof.

[0088] In one embodiment, the present disclosure is a biocatalytic process for the production of reb D, or isomers thereof, from reb A, or isomers thereof, where the starting composition comprises the substrate steviol glycoside, reb A. In a particular embodiment, the present disclosure is a biocatalytic process for the production of reb D, or isomers thereof, from reb A, where the starting composition comprises partially purified reb A. In another particular embodiment, the present disclosure is a biocatalytic process for the production of reb D, or isomers thereof, from reb A, where the starting composition comprises purified reb A.

[0089] In another embodiment, the present disclosure is a biocatalytic process for the production of a reb D isomer from reb A, where the starting composition comprises the substrate steviol glycoside, reb A. In a particular embodiment, the present disclosure is a biocatalytic process for the production of a reb D isomer from reb A, where the starting composition comprises partially purified reb A. In another particular embodiment, the present disclosure is a biocatalytic process for the production of a reb D isomer from reb A, where the starting composition comprises purified reb A.

[0090] In yet another embodiment, the present disclosure is a biocatalytic process for the production of reb M from reb A, where the starting composition comprises the substrate steviol glycoside, reb A. In a particular embodiment, the present disclosure is a biocatalytic process for the production of reb M from reb A, where the starting composition comprises partially purified reb A. In another particular embodiment, the present disclosure is a biocatalytic process for the production of reb M from reb A, where the starting composition comprises purified reb A.

[0091] In still another embodiment, the present disclosure is a biocatalytic process for the production of a reb M isomer from reb A, where the starting composition comprises the substrate steviol glycoside, reb A. In a particular embodiment, the present disclosure is a biocatalytic process for the production of a reb M isomer from reb A, where the starting composition comprises partially purified reb A. In another particular embodiment, the present disclosure is a biocatalytic process for the production of a reb M isomer from reb A, where the starting composition comprises purified reb A.

[0092] In still another embodiment, the present disclosure is a biocatalytic process for the production of a reb Mp1 isomer from reb A, where the starting composition comprises the substrate steviol glycoside, reb A. In a particular embodiment, the present disclosure is a biocatalytic process for the production of a reb Mp1 isomer from reb A, where the starting composition comprises partially purified reb A. In another particular embodiment, the present disclosure is a biocatalytic process for the production of a reb Mp1 isomer from reb A, where the starting composition comprises purified reb A.

[0093] In yet another embodiment, the present disclosure is a biocatalytic process for the production of reb M from reb D, where the starting composition comprises the substrate steviol glycoside, reb D. In a particular embodiment, the present disclosure is a biocatalytic process for the production of reb M from reb D, where the starting composition comprises partially purified reb D. In another particular embodiment, the present disclosure is a biocatalytic process for the production of reb M from reb D, where the starting composition comprises purified reb D.

[0094] In still another embodiment, the present disclosure is a biocatalytic process for the production of a reb M isomer from reb D, where the starting composition comprises the substrate steviol glycoside, reb D. In a particular embodiment, the present disclosure is a biocatalytic process for the production of a reb M isomer from reb D, where the starting composition comprises partially purified reb D. In another particular embodiment, the present disclosure is a biocatalytic process for the production of a reb M isomer from reb D, where the starting composition comprises purified reb D.

[0095] In still another embodiment, the present disclosure is a biocatalytic process for the production of a reb Mp1 isomer from reb D, where the starting composition comprises the substrate steviol glycoside, reb D. In a particular embodiment, the present disclosure is a biocatalytic process for the production of a reb Mp1 isomer from reb D, where the starting composition comprises partially purified reb D. In another particular embodiment, the present disclosure is a biocatalytic process for the production of a reb Mp1 isomer from reb D, where the starting composition comprises purified reb D.

[0096] In still another embodiment, the present disclosure is a biocatalytic process for the production of reb M, a rebM isomer, or a rebMp1 isomer from a reb D isomer, where the starting composition comprises a reb D isomer. In a particular embodiment, the present disclosure is a biocatalytic process for the production of reb M, a reb M isomer or a rebMp1 isomer from a reb D isomer, where the starting composition comprises the partially purified reb D isomer. In another particular embodiment, the present disclosure is a biocatalytic process for the production of reb M, a reb M isomer or a rebMp1 isomer from a reb D isomer, where the starting composition comprises the purified reb D isomer.

[0097] Optionally, the method of the present disclosure further comprises separating the intermediate target steviol glycoside from the intermediate composition. Optionally, the method of the present disclosure further comprises separating the target steviol glycoside from the target composition. The target steviol glycoside can be separated by any suitable method, such as, for example, crystallization, separation by membranes, centrifugation, extraction, chromatographic separation or a combination of such methods.

[0098] In particular embodiments, the methods described herein results in a partially purified intermediate target steviol glycoside and/or target steviol glycoside composition. The term “partially purified”, as used herein, refers to a composition having greater than about 0.5% by weight of the target steviol glycoside on an anhydrous basis. In one embodiment, the partially purified intermediate target steviol glycoside and/or target steviol glycoside composition contains greater than about 90% by weight of the target steviol glycoside on an anhydrous basis, such as, for example, greater than about 0.5%, about 1%, about 2%, about 3%, about 4%, about 5%, about 10%, about 20%, about 30%, about 40%, or about 50% target steviol glycoside content on an anhydrous basis.

[0099] In particular embodiments, the methods described herein results in a purified target intermediate target steviol glycoside and/or steviol glycoside composition. The term “purified”, as used herein, refers to a composition having greater than about 50% by weight of the target steviol glycoside on an anhydrous basis. In one embodiment, the partially purified target steviol glycoside composition contains greater than about 50%, about 60%, about 70%, about 80%, about 85%, or about 90% target steviol glycoside content on an anhydrous basis.

[0100] In particular embodiments, the methods described herein results in a highly purified intermediate target steviol glycoside and/or target steviol glycoside composition. The term “highly purified”, as used herein, refers to a composition having greater than about 80% by weight of the target steviol glycoside on an anhydrous basis. In one embodiment, the highly purified target steviol glycoside composition contains greater than about 90% by weight of the target steviol glycoside on an anhydrous basis, such as, for example, 91% greater than about 92%, greater than about 93%, greater than about 94%, greater than about 95%, greater than about 95%, greater than about 97%, greater than about 98%, greater than about 99%, or greater than about 99.6% target steviol glycoside content on an anhydrous basis.

[0101] In one embodiment, the biocatalytic methods of the present disclosure is carried out more than one time, such that the target steviol glycoside produced by a first biocatalytic process serves as the substrate steviol glycoside (which could also be considered an intermediate target steviol glycoside) for a second biocatalytic process in which the target steviol glycoside is produced.

[0102] In a particular embodiment, the present disclosure provides a biocatalytic process for preparing a composition comprising a target steviol glycoside by contacting a starting composition comprising a substrate steviol glycoside with a first glucosyltransferase polypeptide that utilizes a non-UDP-sugar sugar donor, thereby producing a composition comprising an intermediate target steviol glycoside comprising one or more additional glucose units than the substrate steviol glycoside; contacting the intermediate composition comprising the intermediate target steviol glycoside with a second glucosyltransferase polypeptide, thereby producing a target steviol glycoside comprising one or more additional glucose units than the intermediate target steviol glycoside. Depending on the number of times the method is carried out, there may be one or more intermediate target steviol glycosides (e.g., a first intermediate target steviol glycoside, a second intermediate target steviol glycoside, a third intermediate target steviol glycoside) involved in the production of the target steviol glycoside.

### Glucotransferase Polypeptides

[0103] The present methods are biocatalytic, i.e., utilizes a biological catalyst. In one embodiment, the biocatalyst is protein enzyme. In a particular embodiment, the biocatalyst is a glucosyltransferase polypeptide that utilizes non-UDP-sugar sugar donors. The glucosyltransferase polypeptides can be any glucosyltransferase polypeptides capable of adding at least one glucose unit to the substrate steviol glycoside to provide the intermediate target steviol glycoside and/or the target steviol glycoside.

[0104] The present disclosure also provides a recombinant glycosyltransferase polypeptide comprising an amino acid sequence that is at least 60%, at least 65%, at least 70%, at least 75%, at least 80%, at least 85%, at least 90%, at least 95%, at least 98%, or at least 99% identical to an amino acid sequence selected from the group consisting of SEQ ID NOs: 1-128. The recombinant glycosyltransferase polypeptides of the present disclosure may comprise, or consist of, an amino acid sequence that is at least 60% identical to an amino acid sequence selected from the group consisting of SEQ ID NOs: 2, 3, 22, 29, 39, 41, 42, 45, 49, 50, 51, 52, 53, 54, 55, 56, 62, 63, 72, 87, 90, 91, 94, 97, 98, 99, 100, 101, 102, 109, 110, 111, 112, 113, 115, 117, 118, 119, 121, 123, 124, 125, 126, and 128. In some embodiments, the recombinant glycosyltransferase polypeptide comprises, or consists of, an amino acid sequence that is at least 60% identical to an amino acid sequence selected from the group consisting of SEQ ID NOs: 1, 19, 29, 32, 41, 42, 43, 44, 45, 46, 47, 48, 49, 50, 51, 52, 53, 54, 55, 56, 58, 61, 65, 67, 68, 81, 87, 90, 91, 92, 93, 94, 95, 96, 97, 98, 99, 100, 101, 102, 105, 106, 116, 120, 122, and 127.

[0105] In some embodiments, the glycosyltransferase polypeptide comprises, or consists of, an amino acid sequence selected from the group consisting of SEQ ID NOs: 1-128. In other embodiments, the glycosyltransferase polypeptide comprises, or consists of, an amino acid sequence selected from the group consisting of SEQ ID NOs: 1, 19, 29, 32, 41, 42, 43, 44, 45, 46, 47, 48, 49, 50, 51, 52, 53, 54, 55, 56, 58, 61, 65, 67, 68, 81, 87, 90, 91, 92, 93, 94, 95, 96, 97, 98, 99, 100, 101, 102, 105, 106, 116, 120, 122, and 127. In other embodiments, the glycosyl-transferase polypeptide comprises, or consists of, an amino acid sequence selected from the group consisting of SEQ ID NOs: 2, 3, 22, 29, 39, 41, 42, 45, 49, 50, 51, 52, 53, 54, 55, 56, 62, 63, 72, 87, 90, 91, 94, 97, 98, 99, 100, 101, 102, 109, 110, 111, 112, 113, 115, 117, 118, 119, 121, 123, 124, 125, 126, and 128. In further embodiments, the glycosyltransferase polypeptide is capable of transferring a sugar moiety to a substrate steviol glycoside.

[0106] In one embodiment, the glucosyltransferase polypeptide is produced in a host, such as a microorganism. For example, a DNA sequence encoding glucosyltransferase is cloned into an expression vector and transferred into a production host such as a microbe, e.g., a bacteria. Non-limiting examples of suitable hosts include E. coli, Saccharomyces sp., Aspergillus sp., Pichia sp., Bacillus sp. The overexpressed protein can be isolated from the cell extract based on its physical and chemical properties, using techniques known in the art. Representative non-limiting techniques for isolating glucosyltransferase from a host include centrifugation, electrophoresis, liquid chromatography, ion exchange chromatography, gel filtration chromatography or affinity chromatography.

[0107] Glucosyltransferase polypeptide can be provided as a crude, semi-purified and purified enzyme preparation(s).

[0108] In one embodiment, the glucosyltransferase polypeptide is free. In another embodiment, the glucosyltransferase polypeptide is immobilized. For example, glucosyltransferase may be immobilized to a solid support made from inorganic or organic materials. Non-limiting examples of solid supports suitable to immobilize glucosyltransferase polypeptide include derivatized cellulose or glass, ceramics, methacrylate, styrene, acrylic, metal oxides or membranes. Glucosyltransferase may be immobilized to the solid support, for example, by covalent attachment, adsorption, cross-linking, entrapment or encapsulation.

[0109] The reaction medium for conversion is generally aqueous, e.g., purified water, buffer or a combination thereof In a particular embodiment, the reaction medium is a buffer. Suitable buffers include, but are not limited to, acetate buffer, citrate buffer HEPES, and phosphate buffer. In a particular embodiment, the reaction medium is acetate buffer. In another particular embodiment, the reaction medium is HEPES buffer. The reaction medium can also be, alternatively, an organic solvent.

[0110] In one embodiment, the glucosyltransferase is provided in the form of a whole cell system, such as a living or non-living microbial cell. The whole cell system may optionally be immobilized, as well, utilizing the techniques identified above with respect to immobilization of the enzyme.

[0111] In one embodiment, the glucosyltransferase is any glucosyltransferase capable of adding at least one glucose unit to reb A using a non-UDP-sugar sugar donor, thereby producing stevioside. The glucosyltransferase may be, for example, one of SEQ ID NOs: 1-128.

[0112] In another embodiment, the glucosyltransferase polypeptide is any glucosyltransferase capable of adding at least one glucose unit to rebD or a rebD isomer using a non-UDP-sugar sugar donor, thereby producing reb M or a reb M isomer. The glucosyltransferase polypeptide may be, for example, one of SEQ ID NOs: 2, 3, 22, 29, 39, 41, 42, 45, 49, 50, 51, 52, 53, 54, 55, 56, 62, 63, 72, 87, 90, 91, 94, 97, 98, 99, 100, 101, 102, 109, 110, 111, 112, 113, 115, 117, 118, 119, 121, 123, 124, 125, 126, and 128.

### The Conversion of Reb A to Reb D and/or Reb D Isomers

[0113] In one embodiment, a starting composition comprising reb A is contacted with a glucosyltransferase capable of catalyzing the reaction of a sugar donor (alpha-glucose-1-phosphate, cellobiose, sucrose, maltose, or gentiobiose) and reb A to produce reb D and/or reb D isomers. In one embodiment, the starting composition comprises partially purified reb A. In another embodiment, the starting composition comprises purified reb A. In a particular embodiment, the starting composition comprises >99% reb A. In a particular embodiment, the starting composition comprises greater than 0.5%, about 1%, about 2%, about 3%, about 4%, about 5%, about 10%, about 15%, about 20%, about 30%, about 40%, about 50%, about 60%, about 70% about 80%, about 90%, about 91%, about 92%, about 93%, about 94%, about 95%, about 96%, about 97%, about 98%, about 99%, or about 99.6% reb A.

[0114] In a particular embodiment, the glucosyltransferase polypeptide comprises or consists of an amino acid sequence that is at least 60%, at least 65%, at least 70%, at least 75%, at least 80%, at least 85%, at least 90%, at least 95%, at least 98%, at least 99% or 100% identical to an amino acid sequence selected from the group consisting of SEQ ID NOs: 1, 19, 29, 32, 41, 42, 43, 44, 45, 46, 47, 48, 49, 50, 51, 52, 53, 54, 55, 56, 58, 61, 65, 67, 68, 81, 87, 90, 91, 92, 93, 94, 95, 96, 97, 98, 99, 100, 101, 102, 105, 106, 116, 120, 122, and 127.

[0115] In some embodiments, the glucosyltransferase polypeptide is prepared by expression in a host microorganism. Suitable host microorganisms include, but are not limited to, E. coli, Saccharomyces sp., Aspergillus sp., Pichia sp., Bacillus sp. In a particular embodiment, the glucosyltransferase is expressed in E. coli.

[0116] The glucosyltransferase polypeptide can be provided free or in an immobilized form. The enzyme preparation may be crude, semi-purified and purified. In one embodiment, the glucosyltransferase is provided as a whole-cell system, e.g., a living or non-living microbial cell, or whole microbial cells, cell lysate and/or any other form of known in the art.

[0117] The reaction medium for conversion is generally aqueous, and can be purified water, buffer or a combination thereof. In a particular embodiment, the reaction medium is a buffer. Suitable buffers include, but are not limited to, acetate buffer, citrate buffer, phosphate buffer, and HEPES buffer. In one embodiment, the reaction medium is acetate buffer. In another embodiment, the reaction medium is HEPES buffer.

[0118] In one embodiment, conversion of reb A to reb D and/or rebD isomers further comprises the addition of compounds other than sugar donor (alpha-glucose1-phosphate, cellobiose, sucrose, maltose, or gentiobiose), reb A and the glucosyltransferase. For example, in some embodiments, the reaction medium includes pyridoxal phosphate (PLP) and/or one or more metal ions. Exemplary metal ions include, but are not limited to Ca²⁺, Mg²⁺, Mn²⁺, Fe²⁺, Fe³⁺, CO²⁺, Co³⁺, Ni²⁺, Cu²⁺, Zn²⁺. For example, the reaction medium includes one or more of (NH₄)MgPO₄, Mg₆Al₂(CO₃)(OH)₁₆, MgBr₂, (MgCO₃)₄.Mg(OH)₂, MgCl₂, MgCrO₄, MgF₂, Mg(IO₃)₂, MgI₂, Mg(NO₃)₂, Mg(ClO₄)₂, (CH₃)₃COMgOC(CH₃)₃, Mg(MnO₄)₂, MgHPO₄, Mg₃(PO₄)₂, MgSO₄, CaBr₂, CaCO₃, CaCl₂, CaNCN, CaF₂, H₂Ca, Ca(OH)₂, Ca(IO₃)₂, CaI₂, Ca(NO₃)₂, Ca(NO₂)₂, CaC₂O₄, Ca(ClO₄)₂, [Ca₅(OH)(PO₄)₃]x, Ca(H₂PO₄)₂, Ca₂P₂O₇, CaSO₄, Ca(SCN)₂, MnBr₂, MnCO₃, MnCl₂, [C₆H₁₁(CH₂)₃CO2]₂Mn, MnF₂, (HCO₂)₂Mn, MnI₂, Mn(NO₃)₂, Mn(ClO₄)₂, and MnSO₄.

[0119] The step of contacting the starting composition with the glycosyltransferase polypeptide and the non-UDP-sugar sugar donor can be carried out at temperature between about 0° C. and about 60° C., such as, for example, about 10° C., about 20° C., about 30° C., about 40° C., about 50° C. or about 60° C. In a particular embodiment, the reaction is carried out at about 30° C.

[0120] The step of contacting the starting composition with the glycosyltransferase polypeptide and the non-UDP-sugar sugar donor can carried out in a duration of time between 1 hour and 1 week, such as, for example, about 6 hours, about 12 hours, about 24 hours, about 48 hours, about 72 hours, about 120 hours, about 3 days, about 4 days, about 5 days, about 6 days or about 7 days. In a particular embodiment, the reaction is carried out for about 24 hours.

[0121] The reaction can be monitored by suitable method including, but not limited to, HPLC, LCMS, TLC, IR or NMR.

[0122] In one embodiment, the conversion of reb A to reb D and/or reb D isomer(s) is at least about 2% complete, as determined by any of the methods mentioned above. In a particular embodiment, the conversion of reb A to reb D and/or rebD isomer(s) is at least about 10% complete, at least about 20% complete, at least about 30% complete, at least about 40% complete, at least about 50% complete, at least about 60% complete, at least about 70% complete, at least about 80% complete or at least about 90% complete. In a particular embodiment, the conversion of reb A to reb D and/or rebD isomer(s) is at least about 95% complete. In some embodiments, wherein at least about 5%, about 10%, about 20%, about 30%, about 40%, about 50%, about 60%, about 70%, about 80%, or about 90% of the reb A in the starting composition is converted to reb D and/or rebD isomer(s).

### The Conversion of Reb D to Reb M and/or Reb M Isomers

[0123] In one embodiment, a starting composition comprising reb D is contacted with a glucosyltransferase capable of catalyzing the reaction of a sugar donor (alpha-glucose-1-phosphate, cellobiose, sucrose, maltose, or gentiobiose) and reb D to produce reb M and/or reb M isomers. In one embodiment, a reb D isomer can be used in place of rebD as the substrate of the reaction. In one embodiment, the starting composition comprises partially purified reb D. In another embodiment, the starting composition comprises purified reb D. In a particular embodiment, the starting composition comprises >99% reb D. In a particular embodiment, the starting composition comprises greater than 0.5%, about 1%, about 2%, about 3%, about 4%, about 5%, about 10%, about 15%, about 20%, about 30%, about 40%, about 50%, about 60%, about 70% about 80% about 90%, about 91%, about 92%, about 93%, about 94%, about 95%, about 96%, about 97%, about 98%, about 99%, or about 99.6% reb D and/or its isomers.

[0124] In a particular embodiment, the glucosyltransferase polypeptide comprising an amino acid sequence that is at least 60%, at least 65%, at least 70%, at least 75%, at least 80%, at least 85%, at least 90%, at least 95%, at least 98%, at least 99% or 100% identical to an amino acid sequence selected from the group consisting of SEQ ID NOs: 2, 3, 22, 29, 39, 41, 42, 45, 49, 50, 51, 52, 53, 54, 55, 56, 62, 63, 72, 87, 90, 91, 94, 97, 98, 99, 100, 101, 102, 109, 110, 111, 112, 113, 115, 117, 118, 119, 121, 123, 124, 125, 126, and 128.

[0125] In some embodiments, the glucosyltransferase polypeptide is prepared by expression in a host microorganism. Suitable host microorganisms include, but are not limited to, E. coli, Saccharomyces sp., Aspergillus sp., Pichia sp., Bacillus sp. In a particular embodiment, the glucosyltransferase is expressed in E. coli.

[0126] The glucosyltransferase polypeptide can be provided free or in an immobilized form. The enzyme preparation may be crude, semi-purified and purified. In one embodiment, the glucosyltransferase is provided as a whole-cell system, e.g., a living or non-living microbial cell, or whole microbial cells, cell lysate and/or any other form of known in the art.

[0127] The reaction medium for conversion is generally aqueous, and can be purified water, buffer or a combination thereof. In a particular embodiment, the reaction medium is a buffer. Suitable buffers include, but are not limited to, acetate buffer, citrate buffer, phosphate buffer, and HEPES buffer. In one embodiment, the reaction medium is acetate buffer. In another embodiment, the reaction medium is HEPES buffer.

[0128] In one embodiment, conversion of reb D to reb M or rebM isomers further comprises the addition of compounds other than sugar donor (alpha-glucose-1-phosphate, cellobiose, sucrose, maltose, or gentiobiose), reb D and the glucosyltransferase. For example, in some embodiments, the reaction medium includes pyridoxal phosphate (PLP) and/or one or more metal ions. Exemplary metal ions includes, but are not limited to Ca²⁺, Mg²⁺, Mn²⁺, Fe²⁺, Fe³⁺, CO²⁺, Co³⁺, Ni²⁺, Cu²⁺, Zn²⁺. For example, the reaction medium includes one or more of (NH₄)MgPO₄, Mg₆Al₂(CO₃)(OH)₁₆, MgBr₂, (MgCO₃)₄.Mg(OH)₂, MgCl₂, MgCrO₄, MgF₂, Mg(IO₃)₂, MgI₂, Mg(NO₃)₂, Mg(ClO₄)₂, (CH₃)₃COMgOC(CH₃)₃, Mg(MnO₄)₂, MgHPO₄, Mg₃(PO₄)₂, MgSO₄, CaBr₂, CaCO₃, CaCl₂, CaNCN, CaF₂, H₂Ca, Ca(OH)₂, Ca(IO₃)₂, CaI₂, Ca(NO₃)₂, Ca(NO₂)₂, CaC₂O₄, Ca(ClO₄)₂, [Ca₅(OH)(PO₄)₃]x, Ca(H₂PO₄)₂, Ca₂P₂O₇, CaSO₄, Ca(SCN)₂, MnBr₂, MnCO₃, MnCl₂, [C₆H₁₁(CH₂)₃CO2]₂Mn, MnF₂, (HCO₂)₂Mn, MnI₂, Mn(NO₃)₂, Mn(ClO₄)₂, and MnSO₄.

[0129] The step of contacting the starting composition with the glycosyltransferase polypeptide and the non-UDP-sugar sugar donor can be carried out at temperature between about 0° C. and about 60° C., such as, for example, about 10° C., about 20° C., about 30° C., about 40° C., about 50° C. or about 60° C. In a particular embodiment, the reaction is carried out at about 30° C.

[0130] The step of contacting the starting composition with the glycosyltransferase polypeptide and the non-UDP-sugar sugar donor can be carried out in a duration of time between 1 hour and 1 week, such as, for example, about 6 hours, about 12 hours, about 24 hours, about 48 hours, about 72 hours, about 120 hours, about 3 days, about 4 days, about 5 days, about 6 days or about 7 days. In a particular embodiment, the reaction is carried out for about 24 hours.

[0131] The reaction can be monitored by suitable method including, but not limited to, HPLC, LCMS, TLC, IR or NMR.

[0132] In one embodiment, the conversion of reb D to reb M and/or reb M isomer(s) is at least about 2% complete, as determined by any of the methods mentioned above. In a particular embodiment, the conversion of reb D to reb M and/or rebM isomer(s) is at least about 10% complete, at least about 20% complete, at least about 30% complete, at least about 40% complete, at least about 50% complete, at least about 60% complete, at least about 70% complete, at least about 80% complete or at least about 90% complete. In a particular embodiment, the conversion of rebD to rebM and/or rebM isomer(s) is at least about 95% complete. In some embodiments, wherein at least about 5%, about 10%, about 20%, about 30%, about 40%, about 50%, about 60%, about 70%, about 80%, or about 90% of the rebD in the starting composition is converted to rebM and/or rebM isomer(s).

### Methods of Transferring a Sugar Moiety to a Substrate Steviol Glycoside

[0133] In embodiments, provided herein are methods for transferring a sugar moiety to a substrate steviol glycoside. The methods comprises contacting the substrate steviol glycoside with a glycosyltransferase polypeptide and a non-UDP-sugar sugar donor. In some embodiments, the glycosyltransferase polypeptide comprises an amino acid sequence that is at least 60%, at least 65%, at least 70%, at least 75%, at least 80%, at least 85%, at least 90%, at least 95%, at least 98%, or at least 99% identical to an amino acid sequence selected from the group consisting of SEQ ID NOs: 1-128. In other embodiments, the glycosyltransferase polypeptide comprises an amino acid sequence selected from the group consisting of SEQ ID NOs: 1-128.

[0134] The recombinant glycosyltransferase polypeptide of the present invention teaches that the glycosyltransferase polypeptide comprises an amino acid sequence that is at least 60%, at least 65%, at least 70%, at least 75%, at least 80%, at least 85%, at least 90%, at least 95%, at least 98%, or at least 99% identical to an amino acid sequence selected from the group consisting of SEQ ID NOs: 2, 3, 22, 29, 39, 41, 42, 45, 49, 50, 51, 52, 53, 54, 55, 56, 62, 63, 72, 87, 90, 91, 94, 97, 98, 99, 100, 101, 102, 109, 110, 111, 112, 113, 115, 117, 118, 119, 121, 123, 124, 125, 126, and 128. In some embodiments, the recombinant glycosyltransferase polypeptide comprises an amino acid sequence that is at least 60%, at least 65%, at least 70%, at least 75%, at least 80%, at least 85%, at least 90%, at least 95%, at least 98%, or at least 99% identical to an amino acid sequence selected from the group consisting of SEQ ID NOs: 1, 19, 29, 32, 41, 42, 43, 44, 45, 46, 47, 48, 49, 50, 51, 52, 53, 54, 55, 56, 58, 61, 65, 67, 68, 81, 87, 90, 91, 92, 93, 94, 95, 96, 97, 98, 99, 100, 101, 102, 105, 106, 116, 120, 122, and 127.

[0135] In some embodiments, the substrate steviol glycoside is steviol, steviol-13-O-glucoside, steviol-19-O-glucoside, rubusoside, steviol-1,2-bioside, steviol-1,3-bioside, rubusoside, dulcoside B, dulcoside A, rebaudioside B, rebaudioside G, stevioside, rebaudioside C, rebaudioside F, rebaudioside A, rebaudioside I, rebaudioside E, rebaudioside H, rebaudioside L, rebaudioside K, rebaudioside J, rebaudioside M, rebaudioside D, rebaudioside N, rebaudioside O, rebaudioside Q, an isomer thereof, a synthetic steviol glycoside or combinations thereof. In other embodiments, the substrate steviol glycoside is rebaudioside A, an isomer thereof, or combinations thereof. In further embodiments, the substrate steviol glycoside is rebaudioside D, an isomer thereof, or combinations thereof.

[0136] In some embodiments, the non-UDP-sugar sugar donor is alpha-glucose-1-phosphate, beta-glucose-1-phosphate, cellobiose, sucrose, maltose, gentiobiose, trehalose, kojibiose, nigerose, isomaltose, beta-beta-trehalose, alpha-beta-trehalose, sophorose, laminaribiose, turanose, maltulose, palatinose, gentiobiulose, nigerotriose, maltotriose, melezitose, maltotriulose, kestose, starch, cellulose, glycogen, amylose, amylopectin, dextran, dextrin, maltodextrin, glucose syrup, cellodextrin, cyclodextrin, a non-UDP nucleotide sugar (i.e. ADP-glucose, GDP-glucose, CDP-glucose, TDP-glucose), or a steviol glycoside. In other embodiments, the non-UDP-sugar sugar donor is not alpha-glucose-1-phosphate. In further embodiments, the non-UDP-sugar sugar donor is not beta-glucose-1-phosphate.

[0137] In some embodiments, the glucosyltransferase polypeptide is expressed in a host microorganism. In some embodiments, the host microorganism is E. coli, Saccharomyces sp., Aspergillus sp., Pichia sp., or Bacillus sp.

[0138] In some embodiments, the glucosyltransferase polypeptide is immobilized to a solid support. In some embodiments, the solid support is derivatized cellulose, glass, ceramic, methacrylate, styrene, acrylic, a metal oxide, or a membrane. In other embodiments, the glucosyltransferase polypeptide is immobilized to the solid support by covalent attachment, adsorption, cross-linking, entrapment, or encapsulation.

[0139] In some embodiments, the contacting the substrate steviol glycoside with the glycosyltransferase polypeptide and the non-UDP-sugar sugar donor is in a reaction medium comprising pyridoxal phosphate (PLP) and/or one or more metal ions. In some embodiments, the contacting the substrate steviol glycoside with the glycosyltransferase polypeptide and the non-UDP-sugar sugar donor is at temperature between about 0° C. and about 60° C. In other embodiments, the contacting the substrate steviol glycoside with the glycosyltransferase polypeptide and the non-UDP-sugar sugar donor is at temperature about 30° C. In further embodiments, the contacting the substrate steviol glycoside with the glycosyltransferase polypeptide and the non-UDP-sugar sugar donor is carried out in a duration of time between 1 hour and 1 week. In further embodiments, the contacting the substrate steviol glycoside with the glycosyltransferase polypeptide and the non-UDP-sugar sugar donor is carried out in a duration of time of about 24 hours.

### Methods of Producing a Target Steviol Glycoside

[0140] In some embodiments, provided herein is a method for producing a target steviol glycoside composition, comprising the steps of: (a) providing a starting composition comprising greater than about 0.5%, about 1%, about 2%, about 3%, about 4%, about 5%, about 10%, about 20%, about 30%, about 40%, about 50%, about 60%, about 70%, about 80%, about 90%, about 92%, about 93%, about 94%, about 95%, about 96%, about 97%, about 98%, about 99%, or about 99.6% of a substrate steviol glycoside by weight on an anhydrous basis; (b) contacting the starting composition with a glycosyltransferase polypeptide and a non-UDP-sugar sugar donor; and (c) producing a target composition comprising a target steviol glycoside.

[0141] In some embodiments, the glycosyltransferase polypeptide comprises an amino acid sequence that is at least 60%, at least 65%, at least 70%, at least 75%, at least 80%, at least 85%, at least 90%, at least 95%, at least 98%, or at least 99% identical to an amino acid sequence selected from the group consisting of SEQ ID NOs: 1-128. Combinations may also be used, including, for example, SEQ ID NOS 121 and 128, which form a heterodimer.

[0142] In some embodiments, the substrate steviol glycoside is rebaudioside A, or isomers thereof, and the glycosyltransferase polypeptide comprises an amino acid sequence selected from the group consisting of SEQ ID NOs: 1, 19, 29, 32, 41, 42, 43, 44, 45, 46, 47, 48, 49, 50, 51, 52, 53, 54, 55, 56, 58, 61, 65, 67, 68, 81, 87, 90, 91, 92, 93, 94, 95, 96, 97, 98, 99, 100, 101, 102, 105, 106, 116, 120, 122, and 127.

[0143] In some embodiments, the substrate steviol glycoside is rebaudioside D, or isomers thereof, and the glycosyltransferase polypeptide comprises an amino acid sequence selected from the group consisting of SEQ ID NOs: 2, 3, 22, 29, 39, 41, 42, 45, 49, 50, 51, 52, 53, 54, 55, 56, 62, 63, 72, 87, 90, 91, 94, 97, 98, 99, 100, 101, 102, 109, 110, 111, 112, 113, 115, 117, 118, 119, 121, 123, 124, 125, 126, and 128.

[0144] In some embodiments, the target composition comprises greater than about 0.5%, about 1%, about 2%, about 3%, about 4%, about 5%, about 10%, about 20%, about 30%, about 40%, about 50%, about 60%, about 70%, about 80%, about 85%, about 90%, about 91%, about 92%, about 93%, about 94%, about 95%, about 96%, about 97%, about 98%, about 99%, about 99.6% of the target steviol glycoside by weight on an anhydrous basis.

[0145] In some embodiments, the substrate steviol glycoside is steviol, steviol-13-O-glucoside, steviol-19-O-glucoside, rubusoside, steviol-1,2-bioside, steviol-1,3-bioside, rubusoside, dulcoside B, dulcoside A, rebaudioside B, rebaudioside G, stevioside, rebaudioside C, rebaudioside F, rebaudioside A, rebaudioside I, rebaudioside E, rebaudioside H, rebaudioside L, rebaudioside K, rebaudioside J, rebaudioside M, rebaudioside D, rebaudioside N, rebaudioside O, rebaudioside Q, an isomer thereof, a synthetic steviol glycoside or combinations thereof. In other embodiments, the non-UDP-sugar sugar donor is alpha-glucose-1-phosphate, beta-glucose-1-phosphate, cellobiose, sucrose, maltose, gentiobiose, trehalose, kojibiose, nigerose, isomaltose, beta-beta-trehalose, alpha-beta-trehalose, sophorose, laminaribiose, turanose, maltulose, palatinose, gentiobiulose, nigerotriose, maltotriose, melezitose, maltotriulose, kestose, starch, cellulose, glycogen, amylose, amylopectin, dextran, dextrin, maltodextrin, glucose syrup, cellodextrin, or cyclodextrin. In other embodiments, the non-UDP-sugar sugar donor is not alpha-glucose-1-phosphate. In further embodiments, the non-UDP-sugar sugar donor is not beta-glucose-1-phosphate.

[0146] In some embodiments, at least about 5%, about 10%, about 20%, about 30%, about 40%, about 50%, about 60%, about 70%, about 80%, or about 90% of the substrate steviol glycoside in the starting composition is converted to the target steviol glycoside.

[0147] In some embodiments, the substrate steviol glycoside is rebaudioside A, or isomers thereof and the target steviol glycoside is rebaudioside D, or isomers thereof. In other embodiments, the target steviol glycoside is a rebaudioside D isomer. In further embodiment, the rebaudioside D isomer is rebaudioside D_1.07, rebaudioside D_0.77, rebaudioside D_1.21, rebaudioside D_1.25, or rebaudioside D_1.29.

[0148] In some embodiments, the substrate steviol glycoside is rebaudioside A, or isomers thereof; and the target steviol glycoside is rebaudioside M, or isomers thereof. In other embodiments, the target steviol glycoside is a rebaudioside M isomer. In further embodiment, the rebaudioside M isomer is rebaudioside M_0.66, rebaudioside M_0.80, rebaudioside M_0.92, rebaudioside M_1.06, rebaudioside M_1.11, rebaudioside M_1.17, or rebaudioside M_1.51.

[0149] In some embodiments, the substrate steviol glycoside is rebaudioside A, or isomers thereof; and the target steviol glycoside is a rebaudioside Mp1 isomer. In further embodiment, the rebaudioside Mp1 isomer is rebaudioside Mp1_0.62, rebaudioside Mp1_0.76, rebaudioside Mp1_0.82, rebaudioside Mp1_0.88, rebaudioside Mp1_0.94, rebaudioside Mp1_1.09, rebaudioside Mp1_1.14, rebaudioside Mp1_1.19, rebaudioside Mp1_1.27, rebaudioside Mp1_1.42, or rebaudioside Mp1_1.66.

[0150] In some embodiments, the substrate steviol glycoside is rebaudioside D, or isomers thereof; and the target steviol glycoside is rebaudioside M, or isomers thereof. In other embodiments, the substrate steviol glycoside is a rebaudioside D isomer. In further embodiments, the rebaudioside D isomer is rebaudioside D_1.07, rebaudioside D_0.77, rebaudioside D_1.21, rebaudioside D_1.25, or rebaudioside D_1.29.

[0151] In some embodiments, the target steviol glycoside is a rebaudioside M isomer. In other embodiments, the rebaudioside M isomer is rebaudioside M_0.66, rebaudioside M_0.80, rebaudioside M_0.92, rebaudioside M_1.06, rebaudioside M_1.11, rebaudioside M_1.17, or rebaudioside M_1.51.

[0152] In some embodiments, the target steviol glycoside is a rebaudioside Mp1 isomer. In other embodiments, the rebaudioside Mp1 isomer is rebaudioside Mp1_0.62, rebaudioside Mp1_0.76, rebaudioside Mp1_0.82, rebaudioside Mp1_0.88, rebaudioside Mp1_0.94, rebaudioside Mp1_1.09, rebaudioside Mp1_1.14, rebaudioside Mp1_1.19, rebaudioside Mp1_1.27, rebaudioside Mp1_1.42, rebaudioside Mp1_1.66.

[0153] In some embodiments, the starting composition is a Stevia rebaudiana extract. In other embodiments, the glucosyltransferase polypeptide is expressed in a host microorganism. In further embodiments, the host microorganism is E. coli, Saccharomyces sp., Aspergillus sp., Pichia sp., or Bacillus sp.

[0154] In some embodiments, the glucosyltransferase polypeptide is immobilized to a solid support. In other embodiments, the solid support is derivatized cellulose, glass, ceramic, methacrylate, styrene, acrylic, a metal oxide, or a membrane.

[0155] In some embodiments, the step of contacting the starting composition with the glycosyltransferase polypeptide and the non-UDP-sugar sugar donor is in a reaction medium comprising pyridoxal phosphate (PLP) and/or one or more metal ions. In some embodiments, the step of contacting the starting composition with the glycosyltransferase polypeptide and the non-UDP-sugar sugar donor is at temperature between about 0° C. and about 60° C. In other embodiments, the step of contacting the starting composition with the glycosyltransferase polypeptide and the non-UDP-sugar sugar donor is at temperature about 30° C. In other embodiments, the step of contacting the starting composition with the glycosyltransferase polypeptide and the non-UDP-sugar sugar donor is carried out in a duration of time between 1 hour and 1 week. In further embodiments, the step of contacting the starting composition with the glycosyltransferase polypeptide and the non-UDP-sugar sugar donor is carried out in a duration of time of about 24 hours.

### Two-Step Methods of Producing a Target Steviol Glycoside

[0156] In some embodiments, provided herein is a method for producing a target steviol glycoside composition, comprising the steps of: (a) providing a starting composition comprising greater than about 0.5%, about 1%, about 2%, about 3%, about 4%, about 5%, about 10%, about 20%, about 30%, about 40%, about 50%, about 60%, about 70%, about 80%, about 90%, about 92%, about 93%, about 94%, about 95%, about 96%, about 97%, about 98%, about 99%, or about 99.6% of a substrate steviol glycoside by weight on an anhydrous basis; (b) contacting the starting composition with a first glycosyltransferase polypeptide and a non-UDP-sugar sugar donor; (c) producing an intermediate composition comprising an intermediate target steviol glycoside; (d) contacting the intermediate composition with a second glycosyltransferase polypeptide and the non-UDP-sugar sugar donor; and (e) producing a target composition comprising a target steviol glycoside.

[0157] In some embodiments, provided herein is a method for producing a target steviol glycoside composition, comprising the steps of: (a) providing a starting composition comprising greater than about 0.5%, about 1%, about 2%, about 3%, about 4%, about 5%, about 10%, about 20%, about 30%, about 40%, about 50%, about 60%, about 70%, about 80%, about 90%, about 92%, about 93%, about 94%, about 95%, about 96%, about 97%, about 98%, about 99%, or about 99.6% of a substrate steviol glycoside by weight on an anhydrous basis; (b) contacting the starting composition with a first glycosyltransferase polypeptide and a first non-UDP-sugar sugar donor; (c) producing an intermediate composition comprising an intermediate target steviol glycoside; (d) contacting the intermediate composition with a second glycosyltransferase polypeptide and a second non-UDP-sugar sugar donor; and (e) producing a target composition comprising a target steviol glycoside.

[0158] In some embodiments, the first non-UDP-sugar sugar donor and the second non-UDPsugar sugar donor are identical. In other embodiments, the first non-UDP-sugar sugar donor and the second non-UDP-sugar sugar donor are different. In some embodiments, the first and/or second non-UDP-sugar sugar donor is alpha-glucose-1-phosphate, beta-glucose-1-phosphate, cellobiose, sucrose, maltose, gentiobiose, trehalose, kojibiose, nigerose, isomaltose, beta-beta-trehalose, alpha-beta-trehalose, sophorose, laminaribiose, turanose, maltulose, palatinose, gentiobiulose, nigerotriose, maltotriose, melezitose, maltotriulose, kestose, starch, cellulose, glycogen, amylose, amylopectin, dextran, dextrin, malto-dextrin, glucose syrup, cellodextrin, cyclodextrin, a non-UDP nucleotide sugar (i.e. ADP-glucose, GDP-glucose, CDP-glucose, TDP-glucose), or a steviol glycoside. In further embodiments, the first and/or second non-UDP-sugar sugar donor is not alpha-glucose-1-phosphate. In further embodiments, the first and/or second non-UDP-sugar sugar donor is not beta-glucose-1-phosphate.

[0159] In some embodiments, the first glycosyltransferase polypeptide comprises an amino acid sequence that is at least 60%, at least 65%, at least 70%, at least 75%, at least 80%, at least 85%, at least 90%, at least 95%, at least 98%, or at least 99% identical to an amino acid sequence selected from the group consisting of SEQ ID NOs: 1-128.

[0160] In some embodiments, the second glycosyltransferase polypeptide comprises an amino acid sequence that is at least 60%, at least 65%, at least 70%, at least 75%, at least 80%, at least 85%, at least 90%, at least 95%, at least 98%, or at least 99% identical to an amino acid sequence selected from the group consisting of SEQ ID NOs: 1-128.

[0161] In some embodiments, the first glycosyltransferase polypeptide and the second glycosyltransferase polypeptide are identical. In other embodiments, the first glycosyltransferase polypeptide and the second glycosyltransferase polypeptide are different.

[0162] In some embodiments, the intermediate composition comprises greater than about 5%, about 10%, about 20%, about 30%, about 40%, about 50%, about 60%, about 70%, about 80%, about 85%, about 90%, about 91%, about 92%, about 93%, about 94%, about 95%, about 96%, about 97%, about 98%, about 99%, or about 99.6% of the intermediate target steviol glycoside by weight on an anhydrous basis.

[0163] In other embodiments, the target composition comprises greater than about 0.5%, about 1%, about 2%, about 3%, about 4%, about 5%, about 10%, about 20%, about 30%, about 40%, about 50%, about 60%, about 70%, about 80%, about 85%, about 90%, about 91%, about 92%, about 93%, about 94%, about 95%, about 96%, about 97%, about 98%, about 99%, or about 99.6% of the target steviol glycoside by weight on an anhydrous basis.

[0164] In some embodiments, the substrate steviol glycoside is steviol, steviol-13-O-glucoside, steviol-19-O-glucoside, rubusoside, steviol-1,2-bioside, steviol-1,3-bioside, rubusoside, dulcoside B, dulcoside A, rebaudioside B, rebaudioside G, stevioside, rebaudioside C, rebaudioside F, rebaudioside A, rebaudioside I, rebaudioside E, rebaudioside H, rebaudioside L, rebaudioside K, rebaudioside J, rebaudioside M, rebaudioside D, rebaudioside N, rebaudioside O, rebaudioside Q, an isomer thereof, a synthetic steviol glycoside or combinations thereof. In some embodiments, the non-UDP-sugar sugar donor is alpha-glucose-1-phosphate, beta-glucose-1-phosphate, cellobiose, sucrose, maltose, gentiobiose, trehalose, kojibiose, nigerose, isomaltose, beta-beta-trehalose, alpha-beta-trehalose, sophorose, laminaribiose, turanose, maltulose, palatinose, gentiobiulose, nigerotriose, maltotriose, melezitose, maltotriulose, kestose, starch, cellulose, glycogen, amylose, amylopectin, dextran, dextrin, maltodextrin, glucose syrup, cellodextrin, cyclodextrin, a non-UDP nucleotide sugar (i.e. ADP-glucose, GDP-glucose, CDP-glucose, TDP-glucose), or a steviol glycoside. In further embodiments, the non-UDP-sugar sugar donor is not alpha-glucose-1-phosphate. In further embodiments, the non-UDP-sugar sugar donor is not beta-glucose-1-phosphate.

[0165] In some embodiments, at least about 5%, about 10%, about 20%, about 30%, about 40%, about 50%, about 60%, about 70%, about 80%, or about 90% of the substrate steviol glycoside in the starting composition is converted to the intermediate target steviol glycoside.

[0166] In some embodiments, about 30%, about 40%, about 50%, about 60%, about 70%, about 80%, or about 90% of the intermediate target steviol glycoside in the intermediate composition is converted to the target steviol glycoside.

[0167] In some embodiments, the substrate steviol glycoside is rebaudioside A, or isomers thereof; and the intermediate steviol glycoside is rebaudioside D, or isomers thereof; and the target steviol glycoside is rebaudioside M or isomers thereof. In some embodiments, the substrate steviol glycoside is rebaudioside D, or isomers thereof; and the intermediate steviol glycoside is rebaudioside M, or isomers thereof; and the target steviol glycoside is a rebaudioside Mp1 isomer.

[0168] In some embodiments, the starting composition is a Stevia rebaudiana extract. In other embodiments, the glucosyltransferase polypeptide is expressed in a host microorganism. In further embodiments, the host microorganism is E. coli, Saccharomyces sp., Aspergillus sp., Pichia sp., or Bacillus sp.

[0169] In some embodiments, the glucosyltransferase polypeptide is immobilized to a solid support. In other embodiments, the solid support is derivatized cellulose or glass, ceramics, methacrylate, styrene, acrylic, metal oxides, or membranes.

[0170] In some embodiments, the step of contacting the starting composition with the first glycosyltransferase polypeptide and the non-UDP-sugar sugar donor is in a reaction medium comprising pyridoxal phosphate (PLP) and/or one or more metal ions. In some embodiments, the step of contacting the starting composition with the first glycosyltransferase polypeptide and the non-UDP-sugar sugar donor is at temperature between about 0° C. and about 60° C. In other embodiments, the step of contacting the starting composition with the first glycosyltransferase polypeptide and the non-UDP-sugar sugar donor is at temperature about 30° C. In other embodiments, the step of contacting the starting composition with the first glycosyltransferase polypeptide and the non-UDP-sugar sugar donor is carried out in a duration of time between 1 hour and 1 week. In further embodiments, the step of contacting the starting composition with the first glycosyltransferase polypeptide and the non-UDP-sugar sugar donor is carried out in a duration of time of about 24 hours.

[0171] In some embodiments, the step of contacting the intermediate composition with the second glycosyltransferase polypeptide and the non-UDP-sugar sugar donor is in a reaction medium comprising pyridoxal phosphate (PLP) and/or one or more metal ions. In some embodiments, the step of contacting the intermediate composition with the second glycosyltransferase polypeptide and the non-UDP-sugar sugar donor is at temperature between about 0° C. and about 60° C. In other embodiments, the step of contacting the intermediate composition with the second glycosyltransferase polypeptide and the non-UDP-sugar sugar donor is at temperature about 30° C. In further embodiments, the step of contacting the intermediate composition with the second glycosyltransferase polypeptide and the non-UDP-sugar sugar donor is carried out in a duration of time between 1 hour and 1 week. In further embodiments, the step of contacting the intermediate composition with the second glycosyltransferase polypeptide and the non-UDP-sugar sugar donor is carried out in a duration of time of about 24 hours.

[0172] Recombinant Glycosyltransferase

[0173] In some embodiments, provided herein is a recombinant glycosyltransferase polypeptide comprising an amino acid sequence that is at least 60%, at least 65%, at least 70%, at least 75%, at least 80%, at least 85%, at least 90%, at least 95%, at least 98%, or at least 99% identical to an amino acid sequence selected from the group consisting of SEQ ID NOs: 1-128. In another embodiment, the glucosyltransferase polypeptide is a polypeptide sequence that is at least 60%, 65%, 70%, 75%, 80%, 85%, 86%, 87%, 88%, 89%, 90%, 91%, 92%, 93%, 94%, 95%, 96%, 97%, 98%, 99%, or more sequence identity to one of SEQ ID NOs: 1, 19, 29, 32, 41, 42, 43, 44, 45, 46, 47, 48, 49, 50, 51, 52, 53, 54, 55, 56, 58, 61, 65, 67, 68, 81, 87, 90, 91, 92, 93, 94, 95, 96, 97, 98, 99, 100, 101, 102, 105, 106, 116, 120, 122, and 127. In other embodiments, the recombinant glycosyltransferase polypeptide comprises an amino acid sequence that is at least 60%%, 65%, 70%, 75%, 80%, 85%, 86%, 87%, 88%, 89%, 90%, 91%, 92%, 93%, 94%, 95%, 96%, 97%, 98%, 99% identical to identical to an amino acid sequence selected from the group consisting of SEQ ID NOs: 2, 3, 22, 29, 39, 41, 42, 45, 49, 50, 51, 52, 53, 54, 55, 56, 62, 63, 72, 87, 90, 91, 94, 97, 98, 99, 100, 101, 102, 109, 110, 111, 112, 113, 115, 117, 118, 119, 121, 123, 124, 125, 126, and 128.

[0174] In some embodiments, the recombinant glycosyltransferase polypeptide comprises an amino acid sequence selected from the group consisting of SEQ ID NOs: 1-128. In other embodiments, the recombinant glycosyltransferase polypeptide comprises an amino acid sequence selected from the group consisting of SEQ ID NOs: 2, 3, 22, 29, 39, 41, 42, 45, 49, 50, 51, 52, 53, 54, 55, 56, 62, 63, 72, 87, 90, 91, 94, 97, 98, 99, 100, 101, 102, 109, 110, 111, 112, 113, 115, 117, 118, 119, 121, 123, 124, 125, 126, and 128.

[0175] In some embodiments, the glycosyltransferase polypeptide further comprises a tag amino acid sequence. In some embodiments, the tag amino acid sequence is His6.

[0176] In some embodiments, the recombinant glycosyltransferase polypeptide is capable of transferring a sugar moiety to a substrate steviol glycoside. In some embodiments, the substrate steviol glycoside is steviol, steviol-13-O-glucoside, steviol-19-O-glucoside, rubusoside, steviol-1,2-bioside, steviol-1,3-bioside, rubusoside, dulcoside B, dulcoside A, rebaudioside B, rebaudioside G, stevioside, rebaudioside C, rebaudioside F, rebaudioside A, rebaudioside I, rebaudioside E, rebaudioside H, rebaudioside L, rebaudioside K, rebaudioside J, rebaudioside M, rebaudioside D, rebaudioside N, rebaudioside O, rebaudioside Q, an isomer thereof, a synthetic steviol glycoside or combinations thereof. In other embodiments, the substrate steviol glycoside is rebaudioside A, or an isomer thereof. In further embodiments, the substrate steviol glycoside is rebaudioside D, or an isomer thereof

[0177] In some embodiments, the non-UDP-sugar sugar donor is alpha-glucose-1-phosphate, beta-glucose-1-phosphate, cellobiose, sucrose, maltose, gentiobiose, trehalose, kojibiose, nigerose, isomaltose, beta-beta-trehalose, alpha-beta-trehalose, sophorose, laminaribiose, turanose, maltulose, palatinose, gentiobiulose, nigerotriose, maltotriose, melezitose, maltotriulose, kestose, starch, cellulose, glycogen, amylose, amylopectin, dextran, dextrin, maltodextrin, glucose syrup, cellodextrin, cyclodextrin, a non-UDP nucleotide sugar (i.e. ADP-glucose, GDP-glucose, CDP-glucose, TDP-glucose), or a steviol glycoside.

[0178] In some embodiments, the recombinant glycosyltransferase polypeptide is expressed in a host microorganism. In other embodiments, the host microorganism is E. coli, Saccharomyces sp., Aspergillus sp., Pichia sp., or Bacillus sp.

[0179] In some embodiments, the recombinant glycosyltransferase polypeptide is immobilized to a solid support. In other embodiments, the solid support is derivatized cellulose, glass, ceramic, methacrylate, styrene, acrylic, a metal oxide, or a membrane.

### Modified Microorganism

[0180] In some embodiments, provided herein is a modified microorganism expressing a glycosyltransferase polypeptide comprises an amino acid sequence that is at least 60%, at least 65%, at least 70%, at least 75%, at least 80%, at least 85%, at least 90%, at least 95%, at least 98%, or at least 99% identical to an amino acid sequence selected from the group consisting of SEQ ID NOs: 1-128, or combinations thereof, particularly SEQ ID NOs 121 and 128. In another embodiment, the glucosyltransferase polypeptide is a polypeptide sequence that is at least 60%, 65%, 70%, 75%, 80%, 85%, 86%, 87%, 88%, 89%, 90%, 91%, 92%, 93%, 94%, 95%, 96%, 97%, 98%, 99%, or more sequence identity to one of SEQ ID NOs: 1, 19, 29, 32, 41, 42, 43, 44, 45, 46, 47, 48, 49, 50, 51, 52, 53, 54, 55, 56, 58, 61, 65, 67, 68, 81, 87, 90, 91, 92, 93, 94, 95, 96, 97, 98, 99, 100, 101, 102, 105, 106, 116, 120, 122, and 127. In other embodiments, the glycosyltransferase polypeptide comprises an amino acid sequence that is at least 60%, 65%, 70%, 75%, 80%, 85%, 86%, 87%, 88%, 89%, 90%, 91%, 92%, 93%, 94%, 95%, 96%, 97%, 98%, 99%, or more sequence identity to an amino acid sequence selected from the group consisting of SEQ ID NOs: 2, 3, 22, 29, 39, 41, 42, 45, 49, 50, 51, 52, 53, 54, 55, 56, 62, 63, 72, 87, 90, 91, 94, 97, 98, 99, 100, 101, 102, 109, 110, 111, 112, 113, 115, 117, 118, 119, 121, 123, 124, 125, 126, and 128.

[0181] In some embodiments, provided herein is a method for transferring a sugar moiety to a substrate steviol glycoside, the method comprising contacting the substrate steviol glycoside with the modified microorganism and a non-UDP-sugar sugar donor.

[0182] In some embodiments, provided herein is a method for producing a target steviol glycoside composition, comprising the steps of: (1) providing a starting composition comprising greater than about 0.5%, about 1%, about 2%, about 3%, about 4%, about 5%, about 10%, about 20%, about 30%, about 40%, about 50%, about 60%, about 70%, about 80%, about 90%, about 92%, about 93%, about 94%, about 95%, about 96%, about 97%, about 98%, about 99%, or about 99.6% of a substrate steviol glycoside by weight on an anhydrous basis; (2) contacting the starting composition with the modified microorganism and a non-UDP-sugar sugar donor; and (3) producing a target composition comprising a target steviol glycoside.

[0183] In some embodiments, the glycosyltransferase polypeptide comprises an amino acid sequence selected from the group consisting of SEQ ID NOs: 1-128. In other embodiments, the glycosyltransferase polypeptide comprises an amino acid sequence selected from the group consisting of SEQ ID NOs: 2, 3, 22, 29, 39, 41, 42, 45, 49, 50, 51, 52, 53, 54, 55, 56, 62, 63, 72, 87, 90, 91, 94, 97, 98, 99, 100, 101, 102, 109, 110, 111, 112, 113, 115, 117, 118, 119, 121, 123, 124, 125, 126, and 128. In some embodiments, the glycosyltransferase polypeptide is capable of transferring a sugar moiety to a substrate steviol glycoside.

[0184] In some embodiments, the glycosyltransferase polypeptide further comprises a tag amino acid sequence. In some embodiments, the tag amino acid sequence is His6.

[0185] In some embodiments, the substrate steviol glycoside is steviol, steviol-13-O-glucoside, steviol-19-O-glucoside, rubusoside, steviol-1,2-bioside, steviol-1,3-bioside, rubusoside, dulcoside B, dulcoside A, rebaudioside B, rebaudioside G, stevioside, rebaudioside C, rebaudioside F, rebaudioside A, rebaudioside I, rebaudioside E, rebaudioside H, rebaudioside L, rebaudioside K, rebaudioside J, rebaudioside M, rebaudioside D, rebaudioside N, rebaudioside O, rebaudioside Q, an isomer thereof, a synthetic steviol glycoside or combinations thereof. In other embodiments, the substrate steviol glycoside is rebaudioside A, or an isomer thereof. In further embodiments, the substrate steviol glycoside is rebaudioside D, or an isomer thereof. In some embodiments, the non-UDP-sugar sugar donor is alpha-glucose-1-phosphate, beta-glucose-1-phosphate, cellobiose, sucrose, maltose, gentiobiose, trehalose, kojibiose, nigerose, isomaltose, beta-beta-trehalose, alpha-beta-trehalose, sophorose, laminaribiose, turanose, maltulose, palatinose, gentiobiulose, nigerotriose, maltotriose, melezitose, maltotriulose, kestose, starch, cellulose, glycogen, amylose, amylopectin, dextran, dextrin, maltodextrin, glucose syrup, cellodextrin, or cyclodextrin, a non-UDP nucleotide sugar (i.e. ADP-glucose, GDP-glucose, CDP-glucose, TDP-glucose), or a steviol glycoside.

[0186] In some embodiments, the modified microorganism is E. coli, Saccharomyces sp., Aspergillus sp., Pichia sp., or Bacillus sp. In other embodiments, the glucosyltransferase polypeptide is immobilized to a solid support. In further embodiments, the solid support is derivatized cellulose, glass, ceramic, methacrylate, styrene, acrylic, a metal oxide, or a membrane.

### EXAMPLES

### Example 1: In-Vivo Production of Glucosyltransferases

[0187] Polynucleotides encoding amino acid sequences SEQ ID NO: 1-71 and SEQ ID NO: 109-122 were synthesized (Twist Bioscience) and inserted into the pARZ4 expression vector, generating the following recombinant vectors: pA10225, pA10143, pA10080, pA10135, pA10139, pA10170, pA10122, pA10260, pA10113, pA10180, pA10163, pA10141, pA10181, pA10231, pA10243, pA10172, pA10108, pA10263, pA10251, pA10118, pA10223, pA10082, pA10157, pA10206, pA10166, pA10192, pA10081, pA10204, pA10085, pA10177, pA10121, pA10105, pA10209, pA10216, pA10123, pA10221, pA10140, pA10134, pA10109, pA10131, pA10174, pA10154, pA10152, pA10151, pA10076, pA10155, pA10072, pA10265, pA10074, pA10075, pA10194, pA10176, pA10078, pA10073, pA10147, pA10158, pA10116, pA10262, pA10203, pA10266, pA10149, pA10197, pA10195, pA10212, pA10115, pA10211, pA12546, pA10114, pA10162, pA10126, pA10125, pA10112, pA10213, pA10175, pA10117, pA10259, pA10190, pA10098, pA10188, pA10189, pA10160, pA10084, pA10185, pA10273, pA10224. The recombinant vectors were used in a heat shock method to transform E. coli NEBT7EL (New England Biolabs), thereby preparing recombinant microorganisms.

[0188] The transformed recombinant microorganism was inoculated to 1 ml LB-kanamycin medium, cultured by shaking at 37° C. overnight. The culture was inoculated to 5 ml TB-kanamycin medium and grown for 2 hours at 37° C., followed by 25° C. for 1 hour. The culture was induced with 50 uL 50 mM IPTG and grown overnight. Finally, the culture was centrifuged at top-speed for 5-minutes and stored at −80° C.

### Example 2: Purification of Glucosyltransferases

[0189] The microorganisms created in Example 1 were dissolved in a lysis buffer (lysozyme, DNAseI, Bugbuster, 300 mL 20 mM PO₄ pH 7.5, 500 mM NaCl, and 20 mM Imidazole). Two to three glass beads were added to each well and were disrupted by shaking at 25° C. and 220 rpm for 30 minutes. The disrupted liquid was centrifuged at 2200× g for 6-10 minutes. The obtained supernatant was loaded onto a Ni-NTA plate and shaken for 10 minutes at room temperature. The plate was centrifuged for 4 minutes at 100× g followed by two washes of 500 uL binding buffer (300 mL 20 mM PO₄ pH 7.5, 500 mM NaCl, 20 mM Imidazole) and two minute centrifugation (500× g). The proteins were eluted with 150 uL elution buffer (15 mL 20 mM PO₄ pH 7.5.5, 500 mM NaCl, 500 mM Imidazole) and shaken for 1 minute at 0.25 maximum shaking speed followed by centrifugation for 2 minutes at 500× g. The recovered protein was desalted into a buffer solution for enzyme activity evaluation (20 mM HEPES, 50 mM NaCl, pH 7.5)

### Example 3: Measure Glucosyltransferase Activity with RebA Substrate and Alpha-Glucose-1-Phosphate Sugar Donor

[0190] Purified enzyme from Example 2 was incubated in 100 mM of appropriate buffer (acetate buffer, pH 5; citrate buffer, pH 6.5; HEPES buffer, pH 7.5; or HEPES buffer, pH 8) with 1 mM RebA, 5 mM alpha-glucose-1-phosphate (AG1P), 50 mM NaCl and 1 mM of appropriate cofactor (PLP, CaCl₂, MgCl₂ or MnCl₂) overnight at 30° C. Product rebaudiosides were separated by reverse phase chromatography. Detection was accomplished by an Agilent 6545 QTOF mass spectrophotometer in negative mode. Rebaudioside D and rebaudioside M were identified by comparison of retention times to known standards. Isomers were identified by relative retention time to the standards. Glucosyltransferases were identified that could make rebD isomers and rebM isomers (Table 3).

### Example 4: Measure Glucosyltransferase Activity with RebA Substrate and Cellobiose Sugar Donor

[0191] Purified enzyme from Example 2 was incubated in 100 mM of appropriate buffer (acetate buffer, pH 5; citrate buffer, pH 6.5; HEPES buffer, pH 7.5; or HEPES buffer, pH 8) with 1 mM rebA, 5 mM cellobiose, 50 mM NaCl and 1 mM of appropriate cofactor (PLP, CaCl₂, MgCl₂ or MnCl₂) overnight at 30° C.

[0192] Enzymatic reactions were analyzed for rebaudioside content by UPLC chromatography coupled with Q-TOF MS detection. The products of enzymatic reactions were separated by UPLC on a 150 mm HSS T3 chromatography column using mobile phases of 0.1% formic acid in H₂O and 0.1% formic acid in acetonitrile (Table 1). Chromatographically separated products of enzymatic reactions were detected using an Agilent 6545 quadrupole time-of-flight mass spectrometer in negative mode (Table 2). Rebaudioside identification of RebD and RebM were accomplished by comparison to commercially purchased analytical standards (Chromadex). Commercial standards were dissolved in 90% water, 10% methanol. Rebaudioside isomers were identified by relative retention time to the standards. Glucosyltransferases were identified that could make rebD isomers and rebM isomers (Table 3).

TABLE 1
Chromatography gradient. 4.5 minute separation
of rebaudiosides. Flowrate: 0.5 ml/min

| | % A | % B |
|---|---|---|
| Time | 0.1% formic acid in H2O | 0.1% formic acid in acetonitrile |
| 0 | 80 | 20 |
| 2 | 60 | 40 |
| 2.4 | 0 | 100 |
| 2.9 | 80 | 200 |
| 4.5 | stop | Stop |

TABLE 2
Mass Spectrophotometer Settings
ESI Source Settings

| | | |
|---|---|---|
| Gas Temp | 300 | C. |
| Drying Gas | 13 | l/min |
| Nebulizer | 25 | psig |
| Sheath Gas Temp | 400 | C. |
| Sheath Gas Flow | 12 | l/min |
| Vcap | 3000 | V |
| Nozzle Voltage | 1500 | V |

MS TOF Settings

| | | |
|---|---|---|
| Fragmentor | 80 | V |
| Skimmer | 50 | V |
| OCT 1 RF Vpp | 750 | V |

m/z

| | |
|---|---|
| RebD Isomers in Negative Mode | 1127.4763 |
| RebM Isomers in Negative Mode | 1289.5400 |
| RebMp1 Isomers in Negative Mode | 1451.5820 |

### Example 5: Measure Glucosyltransferase Activity with RebA Substrate and Sucrose Sugar Donor

[0193] Purified enzyme from Example 2 was incubated in 100 mM of appropriate buffer (acetate buffer, pH 5; citrate buffer, pH 6.5; HEPES buffer, pH 7.5; or HEPES buffer, pH 8) with 1 mM rebA, 5 mM sucrose, 50 mM NaCl and 1 mM of appropriate cofactor (PLP, CaCl₂, MgCl₂ or MnCl₂) overnight at 30° C. Product rebaudiosides were measured as in Example 4. Glucosyltransferases were identified that could make rebD isomers and rebM isomers (Table 3).

### Example 6: Measure Glucosyltransferase Activity with RebA Substrate and Maltose Sugar Donor

[0194] Purified enzyme from Example 2 was incubated in 100 mM of appropriate buffer (acetate buffer, pH 5; citrate buffer, pH 6.5; HEPES buffer, pH 7.5; or HEPES buffer, pH 8) with 1 mM rebA, 5 mM maltose, 50 mM NaCl and 1 mM of appropriate cofactor (PLP, CaCl₂, MgCl₂ or MnCl₂) overnight at 30° C. Product rebaudiosides were measured as in Example 4. Glucosyltransferases were identified that could make rebD isomers and rebM isomers (Table 3).

### Example 7: Measure Glucosyltransferase Activity with RebA Substrate and Gentiobiose Sugar Donor

[0195] Purified enzyme from Example 2 was incubated in 100 mM of appropriate buffer (acetate buffer, pH 5; citrate buffer, pH 6.5; HEPES buffer, pH 7.5; or HEPES buffer, pH 8) with 1 mM rebA, 5 mM gentiobiose, 50 mM NaCl and 1 mM of appropriate cofactor (PLP, CaCl₂, MgCl₂ or MnCl₂) overnight at 30° C. Product rebaudiosides were measured as in Example 4.Glucosyltransferases were identified that could make rebD isomers and rebM isomers (Table 3).

TABLE 3
Summary of steviol glycoside products made by each glucosyltransferase
when reacted with rebA and the specified sugar donor.

| | | | Products | | | | | | | | | | |
|---|---|---|---|---|---|---|---|---|---|---|---|---|---|
| | | | RebD Isomers | | | | | RebM Isomers | | | | | |
| Plasmid ID | Seq No | SugarDonor | 0.77 | 1.07 | 1.21 | 1.25 | 1.29 | 0.66 | 0.92 | 1.06 | 1.11 | 1.17 | 1.51 |
| pA10072 | 47 | 5ucrose | | + | | | | | | | | | |
| pA10073 | 54 | Maltose | | | + | | + | | | + | + | + | |
| pA10074 | 49 | Maltose | | + | + | | + | | | | + | + | |
| pA10075 | 50 | Maltose | | + | + | | + | | | + | + | + | |
| pA10076 | 45 | Maltose | | + | + | | + | | + | | + | + | |
| pA10078 | 53 | Gentiobiose | | | + | | + | | | + | + | + | |
| pA10078 | 53 | Maltose | | | + | | + | | | + | + | + | |
| pA10085 | 29 | Cellobiose | | | | | | + | | | | | |
| pA10085 | 29 | Gentiobiose | | | | | | + | | | | | |
| pA10085 | 29 | Maltose | | | | | | + | | | | | |
| pA10085 | 29 | Sucrose | | | | | | + | | | | | |
| pA10105 | 32 | AG1P | | | | | | | | | | | + |
| pA10114 | 68 | Gentiobiose | | | | | + | | | | | + | |
| pA10114 | 68 | Maltose | | | | | + | | | | | | |
| pA10115 | 65 | Gentiobiose | | | | + | | | | | | | |
| pA10147 | 55 | AG1P | | | | | + | | | | | | |
| pA10147 | 55 | BG1P | | | | | + | | | | | | |
| pA10147 | 55 | Cellobiose | | | | | + | | | | | | |
| pA10147 | 55 | Gentiobiose | | | | | + | | | | | | |
| pA10147 | 55 | Maltose | | | | | + | | | | | | |
| pA10147 | 55 | Sucrose | | | | | + | | | | | | |
| pA10149 | 61 | Sucrose | | + | | | | | | | | | |
| pA10151 | 44 | AG1P | | + | | | | | | | | | |
| pA10151 | 44 | Maltose | | + | | + | | | | | | | |
| pA10151 | 44 | Sucrose | | + | | + | | | | | | | |
| pA10152 | 43 | AG1P | | + | | | | | | | | | |
| pA10152 | 43 | Maltose | | + | | | | | | | | | |
| pA10152 | 43 | Sucrose | | + | | + | | | + | | | | |
| pA10154 | 42 | AG1P | | + | | | | | | | | | |
| pA10154 | 42 | Maltose | | + | | | | | | | | | |
| pA10154 | 42 | Sucrose | | + | | + | | | + | | | | |
| pA10155 | 46 | Maltose | | + | | + | | | | | | | |
| pA10158 | 56 | Gentiobiose | | | | | | | | | | | + |
| pA10174 | 41 | Maltose | | | + | | + | | | + | + | + | |
| pA10176 | 52 | Maltose | | + | + | + | + | | | | | + | |
| pA10185 | 120 | AG1P | + | | | | | | | | | | |
| pA10188 | 116 | BG1P | | | | | + | | | | | | |
| pA10194 | 51 | Gentiobiose | | | + | | + | | | + | + | + | |
| pA10194 | 51 | Maltose | | + | + | | + | | | + | + | + | |
| pA10224 | 122 | AG1P | | | | | | | | | | + | |
| pA10225 | 1 | Maltose | + | | | | | | | | | | |
| pA10251 | 19 | AG1P | | | | | | | | | | | + |
| pA10262 | 58 | Sucrose | | | | | + | | | | | | |
| pA10265 | 48 | Sucrose | | + | | | | | | | | | |
| pA12546 | 67 | Maltose | | | | | + | | | | | + | |

### Example 8: Measure Glucosyltransferase Activity with RebA Substrate and Beta-glucose1-Phosphate Sugar Donor

[0196] Purified enzyme from Example 2 was incubated in 100 mM of appropriate buffer (acetate buffer, pH 5; citrate buffer, pH 6.5; HEPES buffer, pH 7.5; or HEPES buffer, pH 8) with 1 mM rebA, 5 mM beta-glucose-1-phosphate (BG1P), 50 mM NaCl and 1 mM of appropriate cofactor (PLP, CaCl₂, MgCl₂ or MnCl₂) overnight at 30° C. Product rebaudiosides were measured as in Example 4. Glucosyltransferases were identified that could make rebD isomers and rebM isomers (Table 3).

### Example 9: Measure Glucosyltransferase Activity with RebD Substrate and Alpha-Glucose-1-Phosphate Sugar Donor

[0197] Purified enzyme from Example 2 was incubated in 100 mM of appropriate buffer (acetate buffer, pH 5; citrate buffer, pH 6.5; HEPES buffer, pH 7.5; or HEPES buffer, pH 8) with 1 mM rebD, 5 mM alpha-glucose-1-phosphate, 50 mM NaCl 1 mM of appropriate cofactor (PLP, CaCl₂, MgCl₂ or MnCl₂) and 2% DMSO overnight at 30° C. Product rebaudiosides were measured as in Example 4.Glucosyltransferases were identified that could make rebM isomers and rebMp1 isomers (Table 4).

### Example 10: Measure Glucosyltransferase Activity with RebD Substrate and Cellobiose Sugar Donor

[0198] Purified enzyme from Example 2 was incubated in 100 mM of appropriate buffer (acetate buffer, pH 5; citrate buffer, pH 6.5; HEPES buffer, pH 7.5; or HEPES buffer, pH 8) with 1 mM rebD, 5 mM cellobiose, 50 mM NaCl, 1 mM of appropriate cofactor (PLP, CaCl₂, MgCl₂ or MnCl₂) 2% DMSO overnight at 30° C. Product rebaudiosides were measured as in Example 4.Glucosyltransferases were identified that could make rebM isomers and rebMp1 isomers (Table 4).

### Example 11: Measure Glucosyltransferase Activity with RebD Substrate and Sucrose Sugar Donor

[0199] Purified enzyme from Example 2 was incubated in 100 mM of appropriate buffer (acetate buffer, pH 5; citrate buffer, pH 6.5; HEPES buffer, pH 7.5; or HEPES buffer, pH 8) with 1 mM rebD, 5 mM sucrose, 50 mM NaCl, 1 mM of appropriate cofactor (PLP, CaCl₂, MgCl₂ or MnCl₂) and 2% DMSO overnight at 30° C. Product rebaudiosides were measured as in Example 4.Glucosyltransferases were identified that could make rebM isomers and rebMp1 isomers (Table 4).

### Example 12: Measure Glucosyltransferase Activity with RebD Substrate and Maltose Sugar Donor

[0200] Purified enzyme from Example 2 was incubated in 100 mM of appropriate buffer (acetate buffer, pH 5; citrate buffer, pH 6.5; HEPES buffer, pH 7.5; or HEPES buffer, pH 8) with 1 mM rebD, 5 mM maltose, 50 mM NaCl, 1 mM of appropriate cofactor (PLP, CaCl₂, MgCl₂ or MnCl₂) and 2% DMSO overnight at 30° C. Product rebaudiosides were measured as in Example 4. Glucosyltransferases were identified that could make rebM isomers and rebMp1 isomers (Table 4).

TABLE 4
Summary of steviol glycoside products made by each glucosyltransferase
when reacted with Reb D and the specified sugar donor.

| | | | Products | | | | | | | | | |
|---|---|---|---|---|---|---|---|---|---|---|---|---|
| | | | RebM Isomers | | | | RebMp1 Isomers | | | | | |
| Plasmid ID | SeqNo | SugarDonor | 0.66 | 0.8 | 0.92 | rebM | 0.76 | 0.82 | 0.88 | 0.94 | 1.09 | 1.66 |
| pA10073 | 54 | Maltose | | + | + | | + | + | + | + | | |
| pA10074 | 49 | Maltose | | + | + | | | | | | | |
| pA10075 | 50 | Maltose | | + | + | | + | + | | + | | |
| pA10076 | 45 | Maltose | | + | + | | | | | | | |
| pA10078 | 53 | Maltose | | + | + | | + | + | | + | | |
| pA10080 | 3 | AG1P | | + | | | | + | | | | |
| pA10082 | 22 | AG1P | | + | | | | | | | | |
| pA10084 | 119 | Maltose | | + | + | | | | | | | |
| pA10084 | 119 | Sucrose | | + | + | | | | | | | |
| pA10085 | 29 | Cellobiose | + | | | | | | | | | |
| pA10098 | 115 | AG1P | | | | | | | | | + | |
| pA10098 | 115 | Cellobiose | | | | | | | | | + | |
| pA10109 | 39 | AG1P | | + | | | | | | | | |
| pA10112 | 109 | Maltose | | + | | | | | | | | |
| pA10117 | 112 | Maltose | | + | | | | | | | | |
| pA10143 | 2 | AG1P | | + | | | | | | | | |
| pA10143 | 2 | Cellobiose | | + | | | | | | | | |
| pA10143 | 2 | Maltose | | + | | | | | | | | |
| pA10143 | 2 | Sucrose | | + | | | | | | | | |
| pA10147 | 55 | AG1P | | | | + | | | | | | |
| pA10147 | 55 | Cellobiose | | | | + | | | | | | |
| pA10147 | 55 | Maltose | | | | + | | | | | | |
| pA10147 | 55 | Sucrose | | | | + | | | | | | |
| pA10154 | 42 | AG1P | | + | | | | | | | | |
| pA10158 | 56 | AG1P | | + | | | + | + | | | | |
| pA10160 | 118 | Maltose | | + | | | | | | | | |
| pA10174 | 41 | Maltose | | + | + | | + | + | | + | | |
| pA10175 | 111 | Maltose | | + | | | | | | | | |
| pA10176 | 52 | Maltose | | + | | | | | | | | |
| pA10189 | 117 | Maltose | | + | | | | | | | | |
| pA10194 | 51 | Maltose | | + | + | | + | + | | + | | |
| pA10195 | 63 | Maltose | | + | | | + | | | | | |
| pA10197 | 62 | Maltose | | + | | | + | | | | | |
| pA10213 | 110 | AG1P | | | | | | | | | | |
| pA10259 | 113 | Maltose | | + | + | | + | + | | + | | |
| pA10273 | 121 | Cellobiose | | | | | | | | | | + |
| pA10273 | 121 | Maltose | | + | | | | | | | | |

### Example 13: Validation of Top Glucosyltransferases with RebA Substrate

[0201] The most active enzymes from the glycosyltransferase library screening (Examples 3-12) were chosen for further validation. The chosen enzymes were purified as in Example 2. The enzymes were assayed in 100 mM of appropriate buffer (acetate buffer, pH 5; citrate buffer, pH 6.5; HEPES buffer, pH 7.5; or HEPES buffer, pH 8) with 1 mM rebA, 5 mM sugar donor (maltose, sucrose, cellobiose, alpha-glucose-1-phosphate, or gentiobiose), 50 mM NaCl, 1 mM of appropriate cofactor (PLP, CaCl₂, MgCl₂ or MnCl₂) and 2% DMSO overnight at 30° C. Product rebaudiosides were measured as in Example 4. Validated glucosyltransferases that make rebD isomers, rebM isomers, and rebMp1 isomers are shown in Table 5.

TABLE 5
Summary of steviol glycoside products made by each glucosyltransferase
when reacted with Reb A and the specified sugar donor.

| | | | Products | | | | | | | | | | | | |
|---|---|---|---|---|---|---|---|---|---|---|---|---|---|---|---|
| | | | RebD Isomers | | | | | RebM Isomers | | | | | RebMp1 Isomers | | |
| Plasmid ID | Seq No | SugarDonor | 0.77 | 1.07 | 1.21 | 1.25 | 1.29 | 0.66 | 0.92 | 1.06 | 1.11 | 1.17 | 1.09 | 1.14 | 1.19 |
| pA10072 | 47 | Sucrose | | + | | | | | | | | | | | |
| pA10073 | 54 | Maltose | | | + | | + | | | + | + | + | | + | + |
| pA10074 | 49 | Maltose | | + | + | | + | | | | + | + | | | |
| pA10075 | 50 | Maltose | | + | + | | + | | | + | + | + | + | + | + |
| pA10076 | 45 | Maltose | | + | + | | + | | | + | + | | | | |
| pA10078 | 53 | Maltose | | | + | | + | | | + | + | + | | + | + |
| pA10085 | 29 | Cellobiose | | | | | | + | | | | | | | |
| pA10085 | 29 | Sucrose | + | | | | + | + | | | | | | | |
| pA10147 | 55 | AG1P | | | | | + | | | | | | | | |
| pA10147 | 55 | Cellobiose | | | | | + | | | | | | | | |
| pA10147 | 55 | Gentiobiose | | | | | + | | | | | | | | |
| pA10147 | 55 | Maltose | | | | | + | | | | | | | | |
| pA10147 | 55 | Sucrose | | | | | + | | | | | | | | |
| pA10151 | 44 | AG1P | | + | | | + | | | | | | | | |
| pA10151 | 44 | Maltose | | + | | + | | | | | | | | | |
| pA10151 | 44 | Sucrose | | + | + | + | | | | | | | | | |
| pA10152 | 43 | AG1P | | + | | | + | | | | | | | | |
| pA10152 | 43 | Maltose | | + | | | + | | | | | | | | |
| pA10152 | 43 | Sucrose | | + | + | | | | + | | | | | | |
| pA10154 | 42 | AG1P | | + | | | | | + | | | | | | |
| pA10154 | 42 | Maltose | | | | | + | | | | | | | | |
| pA10154 | 42 | Sucrose | | + | + | | | | + | | | | | | |
| pA10155 | 46 | Maltose | | + | + | + | | | | | | | | | |
| pA10174 | 41 | Maltose | | | + | | + | | | + | | + | + | | + |
| pA10176 | 52 | Maltose | | + | + | + | + | | | | + | + | | | |
| pA10194 | 51 | Maltose | | + | + | | + | | | + | + | + | + | + | + |
| pA10225 | 1 | Cellobiose | + | | | | | | | | | | | | |
| pA10262 | 58 | AG1P | | | | | + | | | | | | | | |
| pA10262 | 58 | Sucrose | | | | | + | | | | | | | | |

### Example 14: Conversion of RebA to RebD_1.29 with RebA Sugar Donor

[0202] The polypeptide encoded by pA10147 (SEQ NO: 55) was expressed and purified as in Examples 1 and 2. The enzyme was assayed for activity to use RebA as a sugar donor to transfer a glucose molecule from RebA onto another RebA molecule. The enzyme was assayed in 100 mM HEPES buffer, pH 7.5 with 1 mM RebA, 50 mM NaCl, and 1 mM of MgCl₂ and 0.8% DMSO overnight at 30° C. Product rebaudiosides were measured as in Example 4. The pA10147 enzyme produced the RebD_1.29 at quantities significantly greater than background (FIG. 15).

### Example 15: Conversion of RebD to RebM with RebD Sugar Donor

[0203] The polypeptide encoded by pA10147 (SEQ NO: 55) was expressed and purified as in Examples 1 and 2. The enzyme was assayed for activity to use RebD as a sugar donor to transfer a glucose molecule from RebD onto another RebD molecule. The enzyme was assayed in 100 mM HEPES buffer, pH 7.5 with 0.75 mM RebD, 50 mM NaCl, and 1 mM of MgCl₂ and 2% DMSO overnight at 30° C. Product rebaudiosides were measured as in Example 4. The pA10147 enzyme produced RebM at quantities significantly greater than background (FIG. 16).

### Example 16: Rebaudioside Production from RebA Feed with Maltose, Sucrose and Alpha-Glucose-1-phosphate Sugar Donors

[0204] The polypeptides encoded by the plasmids pA10151, pA10152, pA10154, pA10072, pA10176, pA10074, pA10075, pA10076, pA10155, pA10174, pA10073, pA10078, pA10194 were expressed and purified as in Example 1 and 2. The enzymes were assayed in 100 mM of appropriate buffer (sodium acetate buffer, pH 5 ; HEPES buffer, pH 7.5) with 1 mM rebA, 5 mM sugar donor (maltose, sucrose, or alpha-glucose-1-phosphate), 50 mM NaCl, 1 mM of CaCl₂ and 0.8% DMSO overnight at 30° C.

[0205] Enzymatic reactions were analyzed for rebaudioside content by UPLC chromatography coupled with Q-TOF MS detection. The products of enzymatic reactions were separated by UPLC on a 150 mm HSS T3 chromatography column using mobile phases of 0.1% formic acid in H₂O and 0.1% formic acid in acetonitrile (Table 6). Chromatographically separated products of enzymatic reactions were detected using an Agilent 6545 quadrupole time-of-flight mass spectrometer in negative mode (Table 2). Rebaudioside identification of RebD and RebM was accomplished by comparison to commercially purchased analytical standards (Chromadex). Commercial standards were dissolved in 90% water, 10% methanol. Rebaudioside isomers were identified by relative retention time to the standards. Glucosyltransferase activity for rebD isomers, rebM isomers, and rebMp1 isomers are shown in Table 7.

TABLE 6
Chromatography gradient. 20 minute separation
of rebaudiosides. Flowrate: 0.4 ml/min

| | % A: | % B: |
|---|---|---|
| Time (min) | 0.1% formic acid in H2O | 0.1% formic acid in acetonitrile |
| 0 | 80% | 20% |
| 17 | 66.6% | 33.4% |
| 17.25 | 20% | 80% |
| 18 | 20% | 80% |
| 18.5 | 80% | 20% |
| 20 | Stop | stop |

TABLE 7
Summary of steviol glycoside products made by each glucosyltransferase
when reacted with Reb A and the specified sugar donor.

| | | | Products | | | | | | | | | | | | |
|---|---|---|---|---|---|---|---|---|---|---|---|---|---|---|---|
| | | | RebD Isomers | | | | RebM Isomers | | | | RebMp1 Isomers | | | | |
| Plasmid ID | Seq No | Sugar-Donor | 1.07 | 1.21 | 1.25 | 1.29 | 0.92 | 1.06 | 1.11 | 1.17 | 0.88 | 1.14 | 1.19 | 1.27 | 1.42 |
| pA10073 | 54 | Maltose | + | + | | + | | + | + | + | | | + | + | + |
| pA10074 | 49 | Maltose | + | + | | + | | | + | + | | | | | |
| pA10075 | 50 | Maltose | + | + | | + | | + | + | + | | | | + | + |
| pA10076 | 45 | Maltose | + | + | | + | | + | + | | | | | | |
| pA10078 | 53 | Maltose | | + | | + | | + | + | + | | | + | + | + |
| pA10151 | 44 | AG1P | + | | | | | | | | | | | | |
| pA10151 | 44 | Maltose | + | | | | | | | | | | | | |
| pA10151 | 44 | Sucrose | + | | + | | | | | | | | | | |
| pA10152 | 43 | AG1P | + | | | | | | | | | | | | |
| pA10152 | 43 | Maltose | + | | | | | | | | | | | | |
| pA10152 | 43 | Sucrose | + | | + | | + | | | | | | | | |
| pA10154 | 42 | AG1P | + | | | | + | | | | | | | | |
| pA10154 | 42 | Maltose | + | | | | | | | | | | | | |
| pA10154 | 42 | Sucrose | + | | | | + | | | | + | | | | |
| pA10155 | 46 | Maltose | + | | + | | | | | | | | | | |
| pA10174 | 41 | Maltose | | + | | + | | + | + | + | | + | + | + | + |
| pA10176 | 52 | Maltose | + | + | + | + | | | | | | | | | |
| pA10194 | 51 | Maltose | + | + | | + | | + | + | + | | | + | + | + |

[0206] Note that the RebMp1 relative retention times in Example 16 are calculated relative to the RebD retention time.

### Example 17: Rebaudioside Production From RebD Feed with Maltose and Alpha-Glucose-1-Phosphate Sugar Donor

[0207] The polypeptides encoded by the plasmids pA10073, pA10074, pA10075, pA10076, pA10078, pA10080, pA10082, pA10084, pA10109, pA10112, pA10117, pA10131, pA10158, pA10159, pA10160, pA10174, pA10175, pA10176, pA10189, pA10194, pA10195, pA10197, pA10207, pA10216, pA10259, pA10273 were expressed and purified as in Example 1 and 2. The enzymes were assayed in 100 mM of appropriate buffer (sodium acetate buffer, pH 5 ; HEPES buffer, pH 7.5) with 0.375 mM rebD, 5 mM sugar donor (maltose or alpha-glucose-1phosphate), 50 mM NaCl, 1 mM of appropriate co-factor (MnCl₂ or CaCl₂) and 1% DMSO overnight at 30° C. Enzymatic reactions were analyzed for rebaudioside content as in Example 16. Glucosyltransferase activity for rebD isomers, rebM isomers, and rebMp1 isomers are shown in Table 8.

TABLE 8
Summary of steviol glycoside products made by each glucosyltransferase
when reacted with Reb D and the specified sugar donor.

| | | | Products | | | | | | |
|---|---|---|---|---|---|---|---|---|---|
| | | | RebM Isomers | | | RebMp1 Isomers | | | |
| Plasmid ID | SeqNo | Sugar-Donor | 0.66 | 0.80 | 0.92 | 0.62 | 0.76 | 0.82 | 0.94 |
| pA10073 | 54 | Maltose | + | + | + | + | + | + | + |
| pA10075 | 50 | Maltose | + | + | + | + | + | + | + |
| pA10076 | 45 | Maltose | + | + | + | | | | |
| pA10078 | 53 | Maltose | + | + | + | + | + | + | + |
| pA10112 | 109 | Maltose | + | + | + | | | | |
| pA10158 | 56 | AG1P | | | | + | | | |
| pA10174 | 41 | Maltose | + | | | + | | | |
| pA10175 | 111 | Maltose | + | + | + | + | | | |
| pA10176 | 52 | Maltose | + | + | + | | | | |
| pA10194 | 51 | Maltose | + | + | + | + | + | | + |
| pA10195 | 63 | Maltose | + | | | + | | | |
| pA10197 | 62 | Maltose | + | | | + | | | |

Note that the RebMp1 relative retention times in Example 17 are calculated relative to the RebD retention time.

### Example 18: Rebaudioside Production with RebA 50% feed with Maltose and Sucrose Sugar Donors

[0208] The polypeptides encoded by the plasmids pA10074, pA10075, pA10076, pA10151, pA10152, pA10154, pA10176, pA10073, pA10078, pA10155, pA10174, pA10194, pA10114, pA12546 were expressed and purified as in Example 1 and 2. The enzymes were assayed for rebaudioside production in 100 mM of appropriate buffer (sodium acetate buffer, pH 5; HEPES buffer, pH 7.5) with 1 mg/mL 50% RebA (RA50), 10 mM sugar donor (maltose or sucrose), 50 mM NaCl, 1 mM CaCl₂ and 0.8% DMSO overnight at 30° C. To measure rebaudioside products, enzyme solutions were diluted to a final concentration of 30% DMSO and were further diluted 1:10 in water. Quantification was performed on an Agilent 6470 Triple quad mass spectrometer using an Agilent 1290 infinity II LC system with binary pump and autosampler (Table 9). A 5 min gradient was used and data was collected using a multi-reaction monitoring (MRM) quantification method specifically identifying the 1127→803 (reb-D), 965→803 (reb-A), and 1289→803 (reb-M)/1289→965 (reb-M isomer) transitions. Measured amounts of RebD_107, RebD_121 and RebD_129 are shown in Table 10.

TABLE 9
Instrument Settings

| | |
|---|---|
| Column | Waters Acquity UPLC HSS T3 1.8 um. 100 × 50 mm |
| | (p/n 186003539) |
| Temp | 40 C. |
| Flow rate | 0.45 ml/min |
| Injection | 1 uL |
| Solvents | A = 0.1% formic acid in water. B = 0.1% formic |
| | in acetonitrile |
| Wash | 30% Methanol |

### Example 19: Scaled-Up Production of RebD_107 with pA10154

[0209] The polypeptide encoded by plasmid pA10154 (SEQ ID NO: 42) was expressed as in Example 1. The cells were lysed with lysis buffer and the enzyme was purified with gravity-flow immobilized metal affinity chromatography (IMAC). In addition, the microorganism containing the pA10154 plasmid was grown in a 1L fermentation. Ten grams of cells from the fermentation were lysed by French Press and the expressed enzyme was purified by gravity flow IMAC. The pA10154 enzyme was assayed for rebaudioside production in 100 mM sodium acetate buffer, pH 5 with 50 mM NaCl and 1 mM CaCl₂ overnight at 30° C. Rebaudioside conversion with four RA50 concentrations were evaluated (1, 10, 50 or 100 mg/mL RA50) with the corresponding sucrose concentrations: 10, 100, 500 and 1000 mM. The rebaudioside products were measured the same as Example 18. To calculate RebD_1.07 concentrations, the RebD_1.07 response was taken to be the same as the RebD standard response. Absolute yield of RebD_1.07 increases with increasing RA50 (FIG. 17)

TABLE 10
Measured area for RebD isomers RebD_1.07,
RebD_1.21 and RebD_1.29

| Plasmid | | Sugar | RebD Isomer | | |
|---|---|---|---|---|---|
| ID | PH | Donor | 1.07 | 1.21 | 1.29 |
| pA10073 | 7.5 | Maltose | 56363 | 128280 | 518454 |
| pA10075 | 7.5 | Maltose | 6035 | 173703 | 487504 |
| pA10174 | 7.5 | Maltose | 22270 | 73167 | 534386 |
| pA10194 | 7.5 | Maltose | 3517 | 164035 | 419451 |
| pA10078 | 7.5 | Maltose | 11187 | 27962 | 521876 |
| pA10114 | 7.5 | Maltose | 6767 | 141204 | 411987 |
| pA10154 | 5 | Sucrose | 549795 | 202 | 1097 |
| pA10154 | 7.5 | Maltose | 873 | 76412 | 420921 |
| pA10174 | 5 | Maltose | 472 | 54553 | 390157 |
| pA10194 | 5 | Maltose | 1212 | 96461 | 306866 |
| pA10114 | 5 | Maltose | 3711 | 99830 | 271071 |
| pA10073 | 5 | Maltose | 694 | 80564 | 288061 |
| pA10076 | 7.5 | Maltose | 30942 | 172786 | 89430 |
| pA10074 | 7.5 | Maltose | 5469 | 84134 | 199044 |
| pA10075 | 5 | Maltose | 2594 | 77070 | 206001 |
| pA10176 | 7.5 | Maltose | 4618 | 50702 | 227287 |
| pA10154 | 5 | Maltose | 3063 | 59282 | 203202 |
| pA10076 | 5 | Maltose | 13580 | 91103 | 56332 |
| pA10152 | 5 | Sucrose | 156177 | 837 | 853 |
| pA10074 | 5 | Maltose | 2158 | 38041 | 95052 |
| pA10176 | 5 | Maltose | 3098 | 20041 | 74062 |
| pA10155 | 7.5 | Maltose | 59116 | 606 | 1402 |
| pA10151 | 5 | Sucrose | 40464 | 5904 | 5845 |
| pA10151 | 5 | Maltose | 28324 | 444 | 2153 |
| pA10151 | 7.5 | Maltose | 4957 | 4370 | 5597 |
| pA10152 | 5 | Maltose | 10537 | 2346 | 848 |
| pA10078 | 5 | Maltose | 457 | 1662 | 9264 |
| pA10152 | 7.5 | Maltose | 1191 | 1226 | 3009 |
| pA12546 | 7.5 | Maltose | 347 | 639 | 2335 |
| pA12546 | 5 | Maltose | 1066 | 541 | 1613 |
| pA10155 | 5 | Maltose | 1269 | 229 | 299 |

### Example 20: Production of Reb M Isomers with RebD

[0210] The polypeptides encoded by the plasmids pA10073, pA10078, pA10084, pA10112, pA10117, pA10159, pA10160, pA10174, pA10175, pA10194, pA10195, pA10197, pA10216, pA10273 were expressed and purified as in Example 1 and 2. The enzymes were assayed for rebaudioside production in 100 mM of HEPES buffer, pH 7.5 with 0.75 mM RebD, 5 mM sugar donor (maltose or alpha-glucose-1-phosphate), 50 mM NaCl, 1 mM CaCl₂ and 2% DMSO overnight at 30° C. The rebaudioside products were measured the same as Example 18. The analysis specifically focused on identifying the amount of RebM_0.66, RebM_0.80, and RebM_0.92. The measured conversion for each enzyme is shown in FIG. 18.

The application's sequence listing, which the Patent Office published only in electronic form, follows.

SEQUENCE LISTING (128 sequences)

SEQ ID NO: 1 - protein, 418 aa, Corynebacterium glutamicum
MRVAMISMHTSPLQQPGTGDSGGMNVYILSTATELAKQGIEVDIYTRATRPSQGEIVRVAENLRVINIAAGPYEGLSKEELPTQLAAFTGGMLSFTRREKVTYDLIHSHYWLSGQVGWLLRDLWRIPLIHTAHTLAAVKNSYRDDSDTPESEARRICEQQLVDNADVLAVNTQEEMQDLMHHYDADPDRISVVSPGADVELYSPGNDRATERSRRELGIPLHTKVVAFVGRLQPFKGPQVLIKAVAALFDRDPDRNLRVIICGGPSGPNATPDTYRHMAEELGVEKRIRFLDPRPPSELVAVYRAADIVAVPSFNESFGLVAMEAQASGTPVIAARVGGLPIAVAEGETGLLVDGHSPHAWADALATLLDDDETRIRMGEDAVEHARTFSWAATAAQLSSLYNDAIANENVDGETHHG

SEQ ID NO: 2 - protein, 442 aa, Solanum lycopersicum
MATNLRVLMFPWLAYGHISPFLNIAKQLADRGFLIYLCSTRINLESIIKKIPEKYADSIHLIELQLPELPELPPHYHTTNGLPPHLNPTLHKALKMSKPNFSRILQNLKPDLLIYDVLQPWAEHVANEQNIPAGKLLTSCAAVFSYFFSFRKNPGVEFPFPAIHLPEVEKVKIREILAKEPEEGGRLDEGNKQMMLMCTSRTIEAKYIDYCTELCNWKVVPVGPPFQDLITNDADNKELIDWLGTKHENSTVFVSFGSEYFLSKEDMEEVAFALELSNVNFIWVARFPKGEERNLEDALPKGFLERIGERGRVLDKFAPQPRILNHPSTGGFISHCGWNSAMESIDFGVPIIAMPIHNDQPINAKLMVELGVAVEIVRDDDGKIHRGEIAETLKSVVTGETGEILRAKVREISKNLKSIRDEEMDAVAEELIQLCRNSNKSK

SEQ ID NO: 3 - protein, 570 aa, Homo sapiens
MGSGPRRVLDVEVYSSRSKVYVAVDGTTVLEDEAREQGRGIHVIVLNQATGHVMAKRVFDTYSPHEDEAMVLFLNMVAPGRVLICTVKDEGSFHLKDTAKALLRSLGSQAGPALGWRDTWAFVGRKGGPVFGEKHSKSPALSSWGDPVLLKTDVPLSSAEEAECHWADTELNRRRRRFCSKVEGYGSVCSCKDPTPIEFSPDPLPDNKVLNVPVAVIAGNRPNYLYRMLRSLLSAQGVSPQMITVFIDGYYEEPMDVVALFGLRGIQHTPISIKNARVSQHYKASLTATFNLFPEAKFAVVLEEDLDIAVDFFSFLSQSIHLLEEDDSLYCISAWNDQGYEHTAEDPALLYRVETMPGLGWVLRRSLYKEELEPKWPTPEKLWDWDMWMRMPEQRRGRECIIPDVSRSYHFGIVGLNMNGYFHEAYFKKHKFNTVPGVQLRNVDSLKKEAYEVEVHRLLSEAEVLDHSKNPCEDSFLPDTEGHTYVAFIRMEKDDDFTTWTQLAKCLHIWDLDVRGNHRGLWRLFRKKNHFLMVGVPASPYSVKKPPSVTPIFLEPPPKEEGAPGAPEQT

SEQ ID NO: 4 - protein, 473 aa, Stevia rebaudiana
MATSDSIVDDRKQLHVATFPWLAFGHILPYLQLSKLIAEKGHKVSFLSTTRNIQRLSSHISPLINVVQLTLPRVQELPEDAEATTDVHPEDIPYLKKASDGLQPEVTRFLEQHSPDWIIYDYTHYWLPSIAASLGISRAHFSVTTPWAIAYMGPSADAMINGSDGRTTVEDLTTPPKWFPFPTKVCWRKHDLARLVPYKAPGISDGYRMGLVLKGSDCLLSKCYHEFGTQWLPLLETLHQVPVVPVGLLPPEIPGDEKDETWVSIKKWLDGKQKGSVVYVALGSEVLVSQTEVVELALGLELSGLPFVWAYRKPKGPAKSDSVELPDGFVERTRDRGLVWTSWAPQLRILSHESVCGFLTHCGSGSIVEGLMFGHPLIMLPIFGDQPLNARLLEDKQVGIEIPRNEEDGCLTKESVARSLRSVVVEKEGEIYKANARELSKIYNDTKVEKEYVSQFVDYLEKNARAVAIDHES

SEQ ID NO: 5 - protein, 458 aa, Stevia rebaudiana
MENKTETTVRRRRRIILFPVPFQGHINPILQLANVLYSKGFSITIFHTNFNKPKTSNYPHFTFRFILDNDPQDERISNLPTHGPLAGMRIPIINEHGADELRRELELLMLASEEDEEVSCLITDALWYFAQSVADSLNLRRLVLMTSSLFNFHAHVSLPQFDELGYLDPDDKTRLEEQASGFPMLKVKDIKSAYSNWQILKEILGKMIKQTKASSGVIWNSFKELEESELETVIREIPAPSFLIPLPKHLTASSSSGLDHDRTVFQWLDQQPPSSVLYVSFGSTSEVDEKDFLEIARGLVDSKQSFLWVVRPGFVKGSTWVEPLPDGFLGERGRIVKWVPQQEVLAHGAIGAFWTHSGWNSTLESVCEGVPMIFSDFGLDQPLNARYMSDVLKVGVYLENGWERGEIANAIRRVMVDEEGEYIRQNARVLKQKADVSLMKGGSSYESLESLVSYISSL

SEQ ID NO: 6 - protein, 843 aa, Homo sapiens
MAKPLTDSEKRKQISVRGLAGLGDVAEVRKSFNRHLHFTLVKDRNVATPRDYFFALAHTVRDHLVGRWIRTQQHYYERDPKRIYYLSLEFYMGRTLQNTMVNLGLQNACDEAIYQLGLDLEELEEIEEDAGLGNGGLGRLAACFLDSMATLGLAAYGYGIRYEFGIFNQKIVNGWQVEEADDWLRYGNPWEKARPEYMLPVHFYGRVEHTPDGVKWLDTQVVLAMPYDTPVPGYKNNTVNTMRLWSAKAPNDFKLQDFNVGDYIEAVLDRNLAENISRVLYPNDNFFEGKELRLKQEYFVVAATLQDIIRRFKSSKFGCRDPVRTCFETFPDKVAIQLNDTHPALSIPELMRILVDVEKVDWDKAWEITKKTCAYTNHTVLPEALERWPVSMFEKLLPRHLEIIYAINQRHLDHVAALFPGDVDRLRRMSVIEEGDCKRINMAHLCVIGSHAVNGVARIHSEIVKQSVFKDFYELEPEKFQNKTNGITPRRWLLLCNPGLADTIVEKIGEEFLTDLSQLKKLLPLVSDEVFIRDVAKVKQENKLKFSAFLEKEYKVKINPSSMFDVHVKRIHEYKRQLLNCLHVVTLYNRIKRDPAKAFVPRTVMIGGKAAPGYHMAKLIIKLVTSIGDVVNHDPVVGDRLKVIFLENYRVSLAEKVIPAADLSQQISTAGTEASGTGNMKFMLNGALTIGTMDGANVEMAEEAGAENLFIFGLRVEDVEALDRKGYNAREYYDHLPELKQAVDQISSGFFSPKEPDCFKDIVNMLMHHDRFKVFADYEAYMQCQAQVDQLYRNPKEWTKKVIRNIACSGKFSSDRTITEYAREIWGVEPSDLQIPPPNIPRD

SEQ ID NO: 7 - protein, 388 aa, Drosophila melanogaster
MEDDGLCSADQKSCAQSEPDQINEDEFSFKIRRQIEKANADYKPCSSDPQDSDCSCHANVLKRDLAPYKSTGVTRQMIESSARYGTKYKIYGHRLYRDANCMFPARCEGIEHFLLPLVATLPDMDLIINTRDYPQLNAAWGNAAGGPVFSFSKTKEYRDIMYPAWTFWAGGPATKLHPRGIGRWDQMREKLEKRAAAIPWSQKRSLGFFRGSRTSDERDSLILLSRRNPELVEAQYTKNQGWKSPKDTLDAPAADEVSFEDHCKYKYLFNFRGVAASFRLKHLFLCKSLVFHVGDEWQEFFYDQLKPWVHYVPLKSYPSQQEYEHILSFFKKNDALAQEIAQRGYDFIWEHLRMKDIKCYWRKLLKRYVKLLQYEVKPEDQLIYIGPK

SEQ ID NO: 8 - protein, 278 aa, Mus musculus
MNPGPLELQLGDIFIAVKTTWAFHRSRLDLLLDTWVSRIRQQTFIFTDSPDERLQERLGPHLVVTQCSAEHSHPALSCKMAAEFDAFLVSGLRWFCHVDDDNYVNPKALLQLLKTFPQDRDVYVGKPSLNRPIHASELQSKQRTKLVRFWFATGGAGFCINRQLALKMVPWASGSHFVDTSALIRLPDDCTVGYIIECKLGGRLQPSPLFHSHLETLQLLGAAQLPEQVTLSYGVFEGKLNVIKLPGPFSHEEDPSRFRSLHCLLYPDTPWCPLLAAP

SEQ ID NO: 9 - protein, 346 aa, Saccharomyces cerevisiae
MADAPIDTKTTMDYITPSFANKAGKPKACYVTLVRNKELKGLLSSIKYVENKINKKFPYPWVFLNDEPFTEEFKEAVTKAVSSEVKFGILPKEHWSYPEWINQTKAAEIRADAATKYIYGGSESYRHMCRYQSGFFWRHELLEEYDWYWRVEPDIKLYCDINYDVFKWMQENEKVYGFTVSIHEYEVTIPTLWQTSMDFIKKNPEYLDENNLMSFLSNDNGKTYNLCHFWSNFEIANLNLWRSPAYREYFDTLDHQGGFFYERWGDAPVHSIAAALFLPKDKIHYFSDIGYHHPPYDNCPLDKEVYNSNNCECDQGNDFTFQGYSCGKEYYDAQGLVKPKNWKKFR

SEQ ID NO: 10 - protein, 797 aa, Escherichia coli [sequence omitted]

SEQ ID NO: 11 - protein, 926 aa, Hordeum vulgare
MRSVASDREVRGPASTEEELSAVLTSIDSSAIASNIQHHADFTPLFSPEHSSPLKAYHATAKSVFDSLIMNWNATYDYYNKVNAKQAYYLSMEFLQGRALTNAIGNLELTGQYAEALKQLGHNLEDVASQEPDPALGNGGLGRLASCFLDSLATLNYPAWGYGLRYRYGLFKQIITKDGQEEVAENWLEMGNPWEIVRNDVSYPVKFYGKVVEGTDGRKHWIGGENIKAVAHDVPIPGYKTKTTNNLRLWSTTVPSQNFDLGAFNAGDHAKANEAHLNAEKICHVLYPGDESSEGKILRLKQQYTLCSASLQDIISRFESRAGDSLNWEDFPSKVAVQMNDTHPTLCIPELMRILMDIKGLSWNEAWSITERTVAYTNHTVLPEALEKWSLDIMQKLLPRHVEIIETIDEELMNNIVSKYGTADISLLKQKLKDMRILDNVDLPASVAKLFIKPKEKRGKLLVESLESIAEADEKTESQEVENILSETTEKKAESDSEEAPDAEKEDPEYELDPFAKYDPQFPRVVRMANLCVVGGHSVNGVAEIHSEIVKQDVFNSFYEMWPTKFQNKTNGVTPRRWIRFCNPELSTIISKWIGSDDWILNTDKLAGLKKFADDEDLQSEWRTAKRNNKMKVVSLIRDKTGYIVSPDAMFDVQVKRIHEYKRQLLNILGIVYRYKKMKEMSAKDRRKSFVPRVCIFGGKAFATYVQAKRIVKFITDVAATVNYDPDIGDLLKVVFVPDYNVSVAETLIPASELSQHISTAGMEASGTSNMKFAMNGCLLIGTLDGANVEIREEVGEENFFLFGAHAPEIAGLRQERAEGKFVPDLRFEEVKEYVRSGVFGTSNYDELMGSLEGNEGYGRADYFLVGKDFPSYIECQEKVDEAYRDQKLWTRMSILNTAGSPKFSSDRTIHEYAKDIWDISPVIMP

SEQ ID NO: 12 - protein, 458 aa, Stevia rebaudiana
MENKTETTVRRRRRIILFPVPFQGHINPILQLANVLYSKGFSITIFHTNFNKPKTSNYPHFTFRFILDNDPQDERISNLPTHGPLAGMRIPIINEHGADELRRELELLMLASEEDEEVSCLITDALWYFAQSVADSLNLRRLVLMTSSLFNFHAHVSLPQFDELGYLDPDDKTRLEEQASGFPMLKVKDIKSAYSNWQILKEILGKMIKQTKASSGVIWNSFKELEESELETVIREIPAPSFLIPLPKHLTASSSSLLDHDRTVFQWLDQQPPSSVLYVSFGSTSEVDEKDFLEIARGLVDSKQSFLWVVRPGFVKGSTWVEPLPDGFLGERGRIVPWVPQQEVLAHGAIGAFWTHSGWNSTLESVCEGVPMIFSDFGLDQPLNARYMSDVLKVGVYLENGWERGEIANAIRRVMVDEEGEYIRQNARVLKQKADVSLMKGGSSYESLESLVSYISSL

SEQ ID NO: 13 - protein, 565 aa, Lactobacillus johnsonii
MDVKQVEKKDSVDKTNAEENKDSSVKPAENATKAELKGQVKDIVEESGVDTSKLTNDQINELNKINFSKEAKSGTQLTYNDFKKIAKTLIEQDARYAIPFFNASKIKNMPAAKTLDAQSGKVEDLEIWDSWPVQDAKTGYVSNWNGYQLVIGMMGVPNVNDNHIYLLYNKYGDNDFNHWKNAGPIFGLGTPVIQQWSGSATLNKDGSIQLYYTKVDTSDNNTNHQKLASATVYLNLEKDQDKISIAHVDNDHIVFEGDGYHYQTYDQWKETNKGADNIAMRDAHVIDDDNGNRYLVFEASTGTENYQGDDQIYQWLNYGGTNKDNLGDFFQILSNSDIKDRAKWSNAAIGIIKLNDDVKNPSVAKVYSPLISAPMVSDEIERPDVVKLGNKYYLFAATRLNRGSNDDAWMATNKAVGDNVAMIGYVSDNLTHGYVPLNESGVVLTASVPANWRTATYSYYAVPVEGRDDQLLITSYITNRGEVAGKGMHATWAPSFLLQINPDNTTTVLAKMTNQGDWIWDDSSENPDMMGVLEKDAPNSAALPGEWGKPVDWDLIGGYNLKPHQ

SEQ ID NO: 14 - protein, 358 aa, Caenorhabditis elegans
MTDPNGYIVFCPCMGRFGNQVDQFLGVLAFAKALDRTLVLPNFIEFKHPETKMIPFEFLFQVGTVAKYTRVVTMQEFTKKIMPTVWPPEKRKAFCWTPRQAIYDKSAEPGCHSKEGNPFGPYWDQIDVSFVGDEYFGDIPGGFDLNQMGSRKKWLEKFPSEEYPVLAFSSAPAPFPSKGKVWSIQKYLRWSSRITEQAKKFISANLAKPFVAVHLRNDADWVRVCEHIDTTTNRPLFASEQCLGEGHHLGTLTKEICSPSKQQILEQIVEKVGSIGAKSVFVASDKDHMIDEINEALKPYEIEAHRQEPDDMYTSLAIMGRADLFVGNCVSTFSHIVKRERDHAGQSPRPSAFFGIRA

SEQ ID NO: 15 - protein, 293 aa, Homo sapiens
MRVSLPRMVYPQPKVLTPCRKDVLVVTPWLAPIVWEGTFNIDILNEQFRLQNTTIGLTVFAIKKYVAFLKLFLETAEKHFMVGHRVHYYVFTDQPAAVPRVTLGTGRQLSVLEVRAYKRWQDVSMRRMEMISDFCERRFLSEVDYLVCVDVDMEFRDHVGVEILTPLFGTLHPGFYGSSREAFTYERRPQSQAYIPKDEGDFYYLGGFFGGSVQEVQRLTRACHQAMMVDQANGIEAVWHDESHLNKYLLRHKPTKVLSPEYLWDQQLLGWPAVLRKLRFTAVPKNHQAVRNP

SEQ ID NO: 16 - protein, 822 aa, Cellulomonas gilvus
MRYGHFDDAAREYVITTPHTPYPWINYLGSEQFFSLLSHQAGGYSFYRDAKMRRLTRYRYNNIPADAGGRYLYVNDGGDVWTPSWLPVKADLDHFEARHGLGYSRITGERNGLKVETLFFVPLGENAEVQKVTVTNTSDAPKTATLFSFVEFCLWNAQDDQTNYQRNLSIGEVEVEQDGPHGSAIYHKTEYRERRDHYAVFGVNTRADGFDTDRDTFVGAYNSLGEASVPRAGKSADSVASGWYPIGSHSVAVTLQPGESRDLVYVLGYLENPDEEKWADDAHQVVNKAPAHALLGRFATSEQVDAALEALNSYWTNLLSTYSVSSTDEKLDRMVNIWNQYQCMVTFNMSRSASFFETGIGRGMGFRDSNQDLLGFVHLIPERARERIIDIASTQFADGSAYHQYQPLTKRGNNDIGSGFNDDPLWLIAGVAAYIKESGDWGILDEPVPFDNEPGSEVPLFEHLTRSFQFTVQNRGPHGLPLIGRADWNDCLNLNCFSTTPGESFQTTENQAGGVAESVFIAAQFVLYGAEYATLAERRGLADVATEARKYVDEVRAAVLEHGWDGQWFLRAYDYYGNPVGTDAKPEGKIWIEPQGFAVMAGIGVGEGPDDADAPAVKALDSVNEMLGTPHGLVLQYPAYTTYQIELGEVSTYPPGYKENGGIFCHNNPWVIIAETVVGRGAQAFDYYKRITPAYREDISDTHKLEPYVYAQMIAGKEAVRAGEAKNSWLTGTAAWNFVAVSQYLLGVRPDYDGLVVDPQIGPDVPSYTVTRVARGATYEITVTNSGAPGARASLTVDGAPVDGRTVPYAPAGSTVRVEVTV

SEQ ID NO: 17 - protein, 454 aa, Medicago truncatula
MSTFKNEMNGNNLLHVAVLAFPFGTHAAPLLSLVKKIATEAPKVTFSFFCTTTTNDTLFSRSNEFLPNIKYYNVHDGLPKGYVSSGNPREPIFLFIKAMQENFKHVIDEAVAETGKNITCLVTDAFFWFGADLAEEMHAKWVPLWTAGPHSLLTHVYTDLIREKTGSKEVHDVKSIDVLPGFPELKASDLPEGVIKDIDVPFATMLHKMGLELPRANAVAINSFATIHPLIENELNSKFKLLLNVGPFNLTTPQRKVSDEHGCLEWLDQHENSSVVYISFGSVVTPPPHELTALAESLEECGFPFIWSFRGDPKEKLPKGFLERTKTKGKIVAWAPQVEILKHSSVGVFLTHSGWNSVLECIVGGVPMISRPFFGDQGLNTILTESVLEIGVGVDNGVLTKESIKKALELTMSSEKGGIMRQKIVKLKESAFKAVEQNGTSAMDFTTLIQIVTS

SEQ ID NO: 18 - protein, 272 aa, Tropaeolum majus
MQGPPSPGYYPSSQITSLGFDQGYTNLWGPQHQRVDQGSLTIWLDSTSGSGFKSINRYRSGYFGANIKLQSGYTAGVITSFYLSNNQDYPGKHDEIDIEFLGTIPGKPYTLQTNVFIEGSGDYNIIGREMRIHLWFDPTQDYHNYAIYWTPSEIIFFVDDVPIRRYPRKSDATFPLRPLWVYGSVWDASSWATENGKYKADYRYQPFVGKYEDFKLGSCTVEAASSCNPASVSPYGQLSQQQVAAMEWVQKNYMVYNYCDDPTRDHTLTPEC

SEQ ID NO: 19 - protein, 270 aa, Oryctolagus cuniculus
MTDQAFVTLTTNDAYAKGALVLGSSLKQHRTSRRLAVLTTPQVSDTMRKALEIVFDEVITVDILDSGDSAHLTLMKRPELGVTLTKLHCWSLTQYSKCVFMDADTLVLANIDDLFEREELSAAPDPGWPDCFNSGVFVYQPSVETYNQLLHVASEQGSFDGGDQGLLNTFFNSWATTDIRKHLPFIYNLSSISIYSYLPAFKAFGANAKVVHFLGQTKPWNYTYDTKTKSVRSEGHDPTMTHPQFLNVWWDIFTTSVVPLLQQFGLVQDT

SEQ ID NO: 20 - protein, 392 aa, Mus musculus
MPEFFSVRHLELAGDDPYSNVNCTKILQGDPEEIQKVKLEILTVQFKKRPRRTPHDYINMTRDCASFIRTRKYIVEPLTKEEVGFPIAYSIVVHHKIEMLDRLLRAIYMPQNFYCIHVDRKAEESFLAAVQGIASCFDNVFVASQLESVVYASWSRVKADLNCMKDLYRMNANWKYLINLCGMDFPIKTNLEIVRKLKCSTGENNLETEKMPPNKEERWKKRYTVVDGKLTNTGIVKAPPPLKTPLFSGSAYFVVTREYVGYVLENENIQKLMEWAQDTYSPDEFLWATIQRIPEVPGSFPSSNKYDLSDMNAIARFVKWQYFEGHVSNGAPYPPCSGVHVRSVCVFGAGDLSWMLRQHHLFANKFDMDVDPFAIQCLDEHLRHKALENLEH

SEQ ID NO: 21 - protein, 452 aa, Streptomyces venezuelae
MASVLVASNRGPVSYVRGEDGELDARRGGGGLVSGLSAVSSQDSLWVCAALGEGDREAVRRGIGEPGVRMLDIAPDVYADAYNGIANSVLWFLHHHLYDIPREPVFDAAFRHRWEAYRAYNRAFAEALAAAADEGAAVLVQDYHLALVPGQLRELRPDLRIGHFTHTPWASPEYFRMLPADIGDELLRGMLGADELGFHTSAWASAFLSCAGGEQPRTRVRVHPLGVDAEELRALAHRPQVDERLARLREEVGDRKTIVRVDRTELSKNILRGLLAYRELLTVHPEWRDRVVHLASAYPSRQDLAAYRAYTASVTELAAEINAEFGTADWQPVLVSVEDDFTRSLAAYRLADVALVNPVRDGMNLVAKEIPVVSDAGCALVLSTGAGAYEELKEDALTVHPYDVSETAEALHTALTMPPPERADRTKRLASAATALPPQRWFLNQLEGLSDA

SEQ ID NO: 22 - protein, 650 aa, Deinococcus geothermalis
MLKDVLTSELAAQVRDAFDDDRDAETFLLRLERYGEDLWESLRAVYGDQVRALPGRLLEVMLHAYHARPAELRRLDEARLLRPDWLQRPEMVGYVAYTDRFAGTLKGVEERLDYLEGLGVKYLHLMPLLRPREGENDGGYAVQDYRAVRPDLGTMDDLSALARALRGRGISLVLDLVLNHVAREHAWAQKARAGDPKYRAYFHLFPDRRGPDAFEATLPEIFPDFAPGNFSWDEEIGEGEGGWVWTTFNSYQWDLNWANPDVFLEFVDIILYLANRGVEVFRLDAIAFIWKRLGTDCQNQPEVHHLTRALRAAARIVAPAVAFKAEAIVAPADLIHYLGTRAHHGKVSDMAYHNSLMVQLWSSLASRNTRLFEEALRAFPPKPTSTTWGLYVRCHDDIGWAISDEDAARAGLNGAAHRHFLSDFYSGQFPGSFARGLVFQYNPVNGDRRISGSAASLAGLEAALETGDPGRIEDAVRRLLLLHTVILGFGGVPLLYMGDELALLNDYAFEDVPEHAPDNRWVHRPQMDWALAERVRQEPSSPAGRVNTGLRHLLRVRRDTPQLHASIESQVLPSPDSRALLLRRDHPLGGMVQVYNFSEETVMLPSHVLRDVLGDHVQDRLSGSAFRLDRPTVRLEGYRALWLTAGEAPA

SEQ ID NO: 23 - protein, 386 aa, Caenorhabditis elegans
MEKKFLLYDVNFGEGFNLRRDVYMRVANTVRSLRDSGENYILVLPPWGRLHHWKRMEVALSWRLFFDLESLNRFIPVIEFEDFLDENRPIDQVIYLQHYAEGWGTEYVRKFEKRSCLPPAESHYKQVEEFKWKGWFYSYEDVYSRNFQCVSIQGDSGTLKDLLKHSNFSESTSIMVDRAETILHEHYGEVDYWKARRSMRYSNDLVDVADAFRKKYLDSDDKRDKTKLVDDWTKEKPRRTAIGGPYLGIHWRRRDFLYARRAQLPTIPGTAKILQDLCKKLDLQKIYLATDAPDQEVDELKALLNGELEVYRFTDTQKLNDGQIAIIDQYLCAHAAYFIGSYESTFTFRIQEDREIIGFPISTTFNRLCPDTEPTCEQPAKWKIVY

SEQ ID NO: 24 - protein, 531 aa, Arabidopsis thaliana
MEVVSSNSTCLSSISVGEDFPSEYEQWLPVPDPESRRRAGVLLHPTSFRGPHGIGDLGEEAFRFIDWLHSTGCSVWQVLPLVPPDEGGSPYAGQDANCGNTLLISLDELVKDGLLIKDELPQPIDADSVNYQTANKLKSPLITKAAKRLIDGNGELKSKLLDFRNDPSISCWLEDAAYFAAIDNTLNAYSWFEWPEPLKNRHLSALEAIYESQKEFIDLFIAKQFLFQRQWQKVREYARRQGVDIMGDMPIYVGYHSADVWANKKHFLLNKKGFPLLVSGVPPDLFSETGQLWGSPLYDWKAMESDQYSWWVNRIRRAQDLYDECRIDHFRGFAGFWAVPSEAKVAMVGRWKVGPGKSLFDAISKGVGKIKIIAEDLGVITKDVVELRKSIGAPGMAVLQFAFGGGADNPHLPHNHEVNQVVYSGTHDNDTIRGWWDTLDQEEKSKAMKYLSIAGEDDISWSVIQAAFSSTAQTAIIPMQDILGLGSSARMNTPATEVGNWGWRIPSSTSFDNLETESDRLRDLLSLYGRL

SEQ ID NO: 25 - protein, 823 aa, Haemophilus influenzae
MELQQPMQIYTADGKLIGEVGEQRRIPVKLADVPQRLIDAFLATEDSRFYDHHGLDPIGIARALFVAVSNGGASQGASTITQQLARNFFLTSEKTIIRKAREAVLAVEIENTLNKQEILELYLNKIFLGYRSYGVAAAAQTYFGKSLNELTLSEMAIIAGLPKAPSTMNPLYSLKRSEERRNVVLSRMLDEKYISKEEYDAALKEPIVASYHGAKFEFRADYVTEMVRQEMVRRFGEENAYTSGYKVFTTVLSKDQAEAQKAVRNNLIDYDMRHGYRGGAPLWQKNEAAWDNDRIVGFLRKLPDSEPFIPAAVIGIVKGGADILLASGEKMTLSTNAMRWTGRSNPVKVGEQIWIHQRANGEWQLGQIPAANSALVSLNSDNGAIEAVVGGFSYEQSKFNRATQSLVQVGSSIKPFIYAAALEKGLTLSSVLQDSPISIQKPGQKMWQPKNSPDRYDGPMRLRVGLGQSKNIIAIRAIQTAGIDFTAEFLQRFGFKRDQYFASEALALGAASFTPLEMARAYAVFDNGGFLIEPYIIEKIQDNTGKDLFIANPKIACIECNDIPVIYGETKDKINGFANIPLGENALKPTDDSTNGEELDQQPETVPELPELQSNMTALKEDAIDLMAAAKNASSKIEYAPRVISGELAFLIRSALNTAIYGEQGLDWKGTSWRIAQSIKRSDIGGKTGTTNSSKVAWYAGFGANLVTTTYVGFDDNKRVLGRGEAGAKTAMPAWITYMKTALSDKPERKLSLPPKIVEKNIDTLTGLLSPNGGRKEYFIAGTEPTRTYLSEMQERGYYVPTELQQRLNNEGNTPATQPQELF

SEQ ID NO: 26 - protein, 731 aa, Mycobacterium tuberculosis
MSRSEKLTGEHLAPEPAEMARLVAGTHHNPHGILGAHEYDDHTVIRAFRPHAVEVVALVGKDRFSLQHLDSGLFAVALPFVDLIDYRLQVTYEGCEPHTVADAYRFLPTLGEVDLHLFAEGRHERLWEVLGAHPRSFTTADGVVSGVSFAVWAPNAKGVSLIGEFNGWNGHEAPMRVLGPSGVWELFWPDFPCDGLYKFRVHGADGVVTDRADPFAFGTEVPPQTASRVTSSDYTWGDDDWMAGRALRNPVNEAMSTYEVHLGSWRPGLSYRQLARELTDYIVDQGFTHVELLPVAEHPFAGSWGYQVTSYYAPTSRFGTPDDFRALVDALHQAGIGVIVDWVPAHFPKDAWALGRFDGTPLYEHSDPKRGEQLDWGTYVFDFGRPEVRNFLVANALYWLQEFHIDGLRVDAVASMLYLDYSRPEGGWTPNVHGGRENLEAVQFLQEMNATAHKVAPGIVTIAEESTPWSGVTRPTNIGGLGFSMKWNMGWMHDTLDYVSRDPVYRSYHHHEMTFSMLYAFSENYVLPLSHDEVVHGKGTLWGRMPGNNHVKAAGLRSLLAYQWAHPGKQLLFMGQEFGQRAEWSEQRGLDWFQLDENGFSNGIQRLVRDINDIYRCHPALWSLDTTPEGYSWIDANDSANNVLSFMRYGSDGSVLACVFNFAGAEHRDYRLGLPRAGRWREVLNTDATIYHGSGIGNLGGVDATDDPWHGRPASAVLVLPPTSALWLTPA

SEQ ID NO: 27 - protein, 659 aa, Thermococcus litoralis
MERINFIFGIHNHQPLGNFGWVFEEAYNRSYRPFMEILEEFPEMKVNVHFSGPLLEWIEENKPDYLDLLRSLIKRGQLEIVVAGFYEPVLAAIPKEDRLVQIEMLKDYARKLGYDAKGVWLTERVWQPELVKSLREAGIEYVVVDDYHFMSAGLSKEELFWPYYTEDGGEVITVFPIDEKLRYLIPFRPVKKTIEYLESLTSDDPSKVAVFHDDGEKFGVWPGTYEWVYEKGWLREFFDAITSNEKINLMTYSEYLSKFTPRGLVYLPIASYFEMSEWSLPAKQAKLFVEFVEQLKEEGKFEKYRVFVRGGIWKNFFFKYPESNFMHKRMLMVSKAVRDNPEARKYILKAQCNDAYWHGVFGGIYLPHLRRTVWENIIKAQRYLKPENKILDVDFDGRAEIMVENDGFIATIKPHYGGSIFELSSKRKAVNYNDVLPRRWEHYHEVPEATKPEKESEEGIASIHELGKQIPEEIRRELAYDWQLRAILQDHFIKPEETLDNYRLVKYHELGDFVNQPYEYEMIENGVKLWREGGVYAEEKIPARVEKKIELTEDGFIAKYRVLLEKPYKALFGVEINLAVHSVMEKPEEFEAKEFEVNDPYGIGKVRIELDKAAKVWKFPIKTLSQSEAGWDFIQQGVSYTMLFPIEKELEFTVRFREL

SEQ ID NO: 28 - protein, 534 aa, Gluconacetobacter diazotrophicus
MGGPLFPGRSLAGVPGFPLPSIHTQQAYDPQSDFTARWTRADALQIKAHSDATVAAGQNSLPAQLTMPNIPADFPVINPDVWVWDTWTLIDKHADQFSYNGWEVIFCLTADPNAGYGFDDRHVHARIGFFYRRAGIPASRRPVNGGWTYGGHLFPDGASAQVYAGQTYTNQAEWSGSSRLMQIHGNTVSVFYTDVAFNRDANANNITPPQAIITQTLGRIHADFNHVWFTGFTAHTPLLQPDGVLYQNGAQNEFFNFRDPFTFEDPKHPGVNYMVFEGNTAGQRGVANCTEADLGFRPNDPNAETLQEVLDSGAYYQKANIGLAIATDSTLSKWKFLSPLISANCVNDQTERPQVYLHNGKYYIFTISHRTTFAAGVDGPDGVYGFVGDGIRSDFQPMNYGSGLTMGNPTDLNTAAGTDFDPSPDQNPRAFQSYSHYVMPGGLVESFIDTVENRRGGTLAPTVRVRIAQNASAVDLRYGNGGLGGYGDIPANRADVNIAGFIQDLFGQPTSGLAAQASTNNAQVLAQVRQFLNQ

SEQ ID NO: 29 - protein, 625 aa, Neisseria polysaccharea
MQYLKTRILDIYTPEQRAGIEKSEDWRQFSRRMDTHFPKLMNELDSVYGNNEALLPMLEMLLAQAWQSYSQRNSSLKDIDIARENNPDWILSNKQVGGVCYVDLFAGDLKGLKDKIPYFQELGLTYLHLMPLFKCPEGKSDGGYAVSSYRDVNPALGTIGDLREVIAALHEAGISAVVDFIFNHTSNEHEWAQRCAAGDPLFDNFYYIFPDRRMPDQYDRTLREIFPDQHPGGFSQLEDGRWVWTTFNSFQWDLNYSNPWVFRAMAGEMLFLANLGVDILRMDAVAFIWKQMGTSCENLPQAHALIRAFNAVMRIAAPAVFFKSEAIVHPDQVVQYIGQDECQIGYNPLQMALLWNTLATREVNLLHQALTYRHNLPEHTAWVNYVRSHDDIGWTFADEDAAYLGISGYDHRQFLNRFFVNRFDGSFARGVPFQYNPSTGDCRVSGTAAALVGLAQDDPHAVDRIKLLYSIALSTGGLPLIYLGDEVGTLNDDDWSQDSNKSDDSRWAHRPRYNEALYAQRNDPSTAAGQIYQGLRHMIAVRQSNPRFDGGRLVTFNTNNKHIIGYIRNNALLAFGNFSEYPQTVTAHTLQAMPFKAHDLIGGKTVSLNQDLTLQPYQVMWLEIA

SEQ ID NO: 30 - protein, 811 aa, Hungateiclostridium thermocellum
MKFGFFDDANKEYVITVPRTPYPWINYLGTENFFSLISNTAGGYCFYRDARLRRITRYRYNNVPIDMGGRYFYIYDNGDFWSPGWSPVKRELESYECRHGLGYTKIAGKRNGIKAEVTFFVPLNYNGEVQKLILKNEGQDKKKITLFSFIEFCLWNAYDDMTNFQRNFSTGEVEIEGSVIYHKTEYRERRNHYAFYSVNAKISGFDSDRDSFIGLYNGFDAPQAVVNGKSNNSVADGWAPIASHSIEIELNPGEQKEYVFIIGYVENKDEEKWESKGVINKKKAYEMIEQFNTVEKVDKAFEELKSYWNALLSKYFLESHDEKLNRMVNIWNQYQCMVTFNMSRSASYFESGIGRGMGFRDSNQDLLGFVHQIPERARERLLDLAATQLEDGSAYHQYQPLTKKGNNEIGSNFNDDPLWLILATAAYIKETGDYSILKEQVPFNNDPSKADTMFEHLTRSFYHVVNNLGPHGLPLIGRADWNDCLNLNCFSTVPDESFQTTTSKDGKVAESVMIAGMFVFIGKDYVKLCEYMGLEEEARKAQQHIDAMKEAILKYGYDGEWFLRAYDDFGRKVGSKENEEGKIFIESQGFCVMAEIGLEDGKALKALDSVKKYLDTPYGLVLQNPAFTRYYIEYGEISTYPPGYKENAGIFCHNNAWIICAETVVGRGDMAFDYYRKIAPAYIEDVSDIHKLEPYVYAQMVAGKDAKRHGEAKNSWLTGTAAWNFVAISQWILGVKPDYDGLKIDPCIPKAWDGYKVTRYFRGSTYEITVKNPNHVSKGVAKITVDGNEISGNILPVFNDGKTHKVEVIMG

SEQ ID NO: 31 - protein, 415 aa, Pyrococcus horikoshii
MMYEVKEFSSGKRKLEDYKSIIGEEEVSKIQEKAEKLKGRSFVHVNSTSFGGGVAEILHSLVPLLRSIGIEARWFVIEGPTEFFNVTKTFHNALQGNESLKLTEEMKELYLNVNRENSKFIDLSSFDYVLVHDPQPAALIEFYEKKSPWLWRCHIDLSSPNREFWEFLRRFVEKYDRYIFHLPEYVQPELDRNKAVIMPPSIDPLSEKNVELKQTEILRILERFDVDPEKPIITQVSRFDPWKGIFDVIEIYRKVKEKIPGVQLLLVGVMAHDDPEGWIYFEKTLRKIGEDYDVKVLTNLIGVHAREVNAFQRASDVILQMSIREGFGLTVTEAMWKGKPVIGRAVGGIKFQIVDGETGFLVRDANEAVEKVLYLLKHPEVSKEMGAKAKERVRKNFIITKHMERYLDILNSLGG

SEQ ID NO: 32 - protein, 465 aa, Medicago truncatula
MSMSDINKNSELIFIPAPGIGHLASALEFAKLLTNHDKNLYITVFCIKFPGMPFADSYIKSVLASQPQIQLIDLPEVEPPPQELLKSPEFYILTFLESLIPHVKATIKTILSNKVVGLVLDFFCVSMIDVGNEFGIPSYLFLTSNVGFLSLMLSLKNRQIEEVFDDSDRDHQLLNIPGISNQVPSNVLPDACFNKDGGYIAYYKLAERFRDTKGIIVNTFSDLEQSSIDALYDHDEKIPPIYAVGPLLDLKGQPNPKLDQAQHDLILKWLDEQPDKSVVFLCFGSMGVSFGPSQIREIALGLKHSGVRFLWSNSAEKKVFPEGFLEWMELEGKGMICGWAPQVEVLAHKAIGGFVSHCGWNSILESMWFGVPILTWPIYAEQQLNAFRLVKEWGVGLGLRVDYRKGSDVVAAEEIEKGLKDLMDKDSIVHKKVQEMKEMSRNAVVDGGSSLISVGKLIDDITGSN

SEQ ID NO: 33 - protein, 491 aa, Arabidopsis thaliana
MSNRIMGFAEARVLDAGVFPNVTNINSDKLLGGLLASGFDEDSCLSRYQSVHYRKPSPYKPSSYLISKLRNYEKLHKRCGPGTESYKKALKQLDQEHIDGDGECKYVVWISFSGLGNRILSLASVFLYALLTDRVLLVDRGKDMDDLFCEPFLGMSWLLPLDFPMTDQFDGLNQESSRCYGYMVKNQVIDTEGTLSHLYLHLVHDYGDHDKMFFCEGDQTFIGKVPWLIVKTDNYFVPSLWLIPGFDDELNKLFPQKATVFHHLGRYLFHPTNQVWGLVTRYYEAYLSHADEKIGIQVRVFDEDPGPFQHVMDQISSCTQKEKLLPEVDTLVERSRHVNTPKHKAVLVTSLNAGYAENLKSMYWEYPTSTGEIIGVHQPSQEGYQQTEKKMHNGKALAEMYLLSLTDNLVTSAWSTFGYVAQGLGGLKPWILYRPENRTTPDPSCGRAMSMEPCFHSPPFYDCKAKTGIDTGTLVPHVRHCEDISWGLKLV

SEQ ID NO: 34 - protein, 485 aa, Aquifex aeolicus
MRLAGILLHVTSLPSPYGIGDLGKEAYRFLDFLKECGFSLWQVLPLNPTSLEAGNSPYSSNSLFAGNYVLIDPEELLEEDLIKERDLKRFPLGEALYEVVYEYKKELLEKAFKNFRRFELLEDFLKEHSYWLRDYALYMAIKEEEGKEWYEWDEELKRREKEALKRVLNKLKGRFYFHVFVQFVFFKQWEKLRRYARERGISIVGDLPMYPSYSSADVWTNPELFKLDGDLKPLFVAGVPPDFFSKTGQLWGNPVYNWEEHEKEGFRWWIRRVHHNLKLFDFLRLDHFRGFEAYWEVPYGEETAVNGRWVKAPGKTLFKKLLSYFPKNPFIAEDLGFITDEVRYLRETFKIPGSRVIEFAFYDKESEHLPHNVEENNVYYTSTHDLPPIRGWFENLGEESRKRLFEYLGREIKEEKVNEELIRLVLISRAKFAIIQMQDLLNLGNEARMNYPGRPFGNWRWRIKEDYTQKKEFIKKLLGIYGREV

SEQ ID NO: 35 - protein, 274 aa, Bos taurus
MSLTACPEESPLLVGPMLIEFNIPVDLKLVEQQNPKVKLGGRYTPMDCISPHKVAIIIPFRNRQEHLKYWLYYLHPILQRQQLDYGIYVINQAGESMFNRAKLLNVGFKEALKDYDYNCFVFSDVDLIPMNDHNTYRCFSQPRHISVAMDKFGFSLPYVQYFGGVSALSKQQFLSINGFPNNYWGWGGEDDDIYNRLAFRGMSVSRPNAVIGKCRMIRHSRDKKNEPNPQRFDRIAHTKETMLSDGLNSLTYMVLEVQRYPLYTKITVDIGTPS

SEQ ID NO: 36 - protein, 474 aa, Escherichia coli
MSRLVVVSNRIAPPDEHAASAGGLAVGILGALKAAGGLWFGWSGETGNEDQPLKKVKKGNITWASFNLSEQDLDEYYNQFSNAVLWPAFHYRLDLVQFQRPAWDGYLRVNALLADKLLPLLQDDDIIWIHDYHLLPFAHELRKRGVNNRIGFFLHIPFPTPEIFNALPTYDTLLEQLCDYDLLGFQTENDRLAFLDCLSNLTRVTTRSAKSHTAWGKAFRTEVYPIGIEPKEIAKQAAGPLPPKLAQLKAELKNVQNIFSVERLDYSKGLPERFLAYEALLEKYPQHHGKIRYTQIAPTSRGDVQAYQDIRHQLENEAGRINGKYGQLGWTPLYYLNQHFDRKLLMKIFRYSDVGLVTPLRDGMNLVAKEYVAAQDPANPGVLVLSQFAGAANELTSALIVNPYDRDEVAAALDRALTMSLAERISRHAEMLDVIVKNDINHWQECFISDLKQIVPRSAESQQRDKVATFPKLA

SEQ ID NO: 37 - protein, 458 aa, Stevia rebaudiana
MENKTETTVRRRRRIILFPVPFQGHINPILQLANVLYSKGFSITIFHTNFNKPKKSNYPHFTFRFILDNDPQDERISNLPTHGPLAGMRIPIINEHGADELRRELELLMLASEEDEEVSCLITDALWYFAQSVADSLNLRRLVLMTSSLFNFHAHVSLPQFDELGYLDPDDKTRLEEQASGFPMLKVKDIKSAYSNWQILKEILGKMIKQTKASSGVIWNSFKELEESELETVIREIPAPSFLIPLPKHLTASSSSLLDHDRTVFQWLDQQPPSSVLYVSFGSTSEVDEKDFLEIARGLVDSKQSFLWVVRPGFVKGSTWVEPLPDGFLGERGRIVKWVPQQEVLAHGAIGAFWTHSGWNSTLESVCEGVPMIFSDFGLDQPLNARYMSDVLKVGVYLENGWERGEIANAIRRVMVDEEGEYIRQNARVLKQKADVSLMKGGSSYESLESLVSYISSL

SEQ ID NO: 38 - protein, 458 aa, Stevia rebaudiana
MENKTETTVRRRRRIILFPVPFQGHINPILQLANVLYSKGFSITIFHTNFNKPKTSNYPHFTFRFILDNDPQDERISNLPTHGPLAGMRIPIINEHGADELRRELELLMLASEEDEEVSCLITDALWYFAQSVADSLNLRRLVLMTSSLFNFHAHVSLPQFDELGYLDPDDKTRLEEQASGFPMLKVKDIKSAYSNWQILKEILGKMIKQTKASSGVIWNSFKELEESELETVIREIPAPSFLIPLPKHLTASSSSLLDHDRTVFQWLDQQPPSSVLYVSFGSTSEVDEKDFLEIARGLVDSKQSFLWVVRPGFVKGSTWVEPLPDGFLGERGRIVKWVPQQEVLAHGAIGAFWTHSGWNSTLESVCEGVPMIFSDFGLDQPLNARYMSDVLKVGVYLENGWERGEIANAIRRVMVDEEGEYIRQNARVLKQKADVSLMKGGSSYESLESLVSYISSL

SEQ ID NO: 39 - protein, 449 aa, Arabidopsis thaliana
MEHKRGHVLAVPYPTQGHITPFRQFCKRLHFKGLKTTLALTTFVFNSINPDLSGPISIATISDGYDHGGFETADSIDDYLKDFKTSGSKTIADIIQKHQTSDNPITCIVYDAFLPWALDVAREFGLVATPFFTQPCAVNYVYYLSYINNGSLQLPIEELPFLELQDLPSFFSVSGSYPAYFEMVLQQFINFEKADFVLVNSFQELELHENELWSKACPVLTIGPTIPSIYLDQRIKSDTGYDLNLFESKDDSFCINWLDTRPQGSVVYVAFGSMAQLTNVQMEELASAVSNFSFLWVVRSSEEEKLPSGFLETVNKEKSLVLKWSPQLQVLSNKAIGCFLTHCGWNSTMEALTFGVPMVAMPQWTDQPMNAKYIQDVWKAGVRVKTEKESGIAKREEIEFSIKEVMEGERSKEMKKNVKKWRDLAVKSLNEGGSTDTNIDTFVSRVQSK

SEQ ID NO: 40 - protein, 390 aa, Bacteroides fragilis
MSLFNDKVAKLLAGHEALLMRKNEPVEEGNGVITRYRYPVLTAAHTPVFWRYDLNEETNPFLMERIGMNATLNAGAIKWDGKYLMLVRVEGADRKSFFAVAESPNGIDNFRFWEYPVTLPEDVVPATNVYDMRLTAHEDGWIYGIFCAERHDDNAPIGDLSSATATAGIARTKDLKNWERLPDLKTKSQQRNVVLHPEFVDGKYALYTRPQDGFIDTGSGGGIGWALIDDITHAEVGEEKIIDKRYYHTIKEVKNGEGPHPIKTPQGWLHLAHGVRNCAAGLRYVLYMYMTSLDDPTRLIASPAGYFMAPVGEERIGDVSNVLFSNGWIADDDGKVFIYYASSDTRMHVATSTIERLVDYCLHTPQDGFSSSASVEILKNLIERNLRLMK

SEQ ID NO: 41 - protein, 788 aa, Pseudomonas aeruginosa
MVEALRNVQLQIPLKVYSEDGKLISEFGEMRRTPIRFADIPQDFIHALLSAEDDNFANHYGVDVKSLMRAAAQLLKSGHIQTGGSTITMQVAKNYFLTNERSFSRKINEILLALQIERQLTKDEILELYVNKIYLGNRAYGIEAAAQVYYGKPIKDLSLAEMAMIAGLPKAPSRYNPLVNPTRSTERRNWILERMLKLGFIDQQRYQAAVEEPINASYHVQTPELNAPYIAEMARAEMVGRYGSEAYTEGYKVITTVRSDLQNAASQSVRDGLIDYDQRHGYRGPETRLPGQTRDAWLKHLGQQRSIGGLEPAIVTQVEKSGIMVMTRDGKEEAVTWDSMKWARPFLSNNSMGPMPRQPADVAQAGDQIRVQRQEDGTLRFVQIPAAQSALISLDPKDGAIRSLVGGFSFEQSNYNRAIQAKRQPGSSFKPFIYSAALDNGFTAASLVNDAPIVFVDEYLDKVWRPKNDTNTFLGPIPLREALYKSRNMVSIRVLQGLGIERAISYITKFGFQRDELPRNFSLALGTATVTPMEIAGAWSVFANGGYKVNPYVIERIESRDGQVLYQANPPRVPVEEQVAADAEDAGNPGDPEHPESAEGEGSIEAQQVAAKAQTTFEPTPAERIIDARTAYIMTSMLQDVIKRGTGRRALALKRTDLAGKTGTTNDSKDGWFSGYNSDYVTSVWVGFDQPETLGRREYGGTVALPIWIRYMGFALKDKPMHTMAEPPGIVSLRIDPVTGRSAAPGTPGAYFEMFKNEDTPPSVNELPPGSFPGSPLPDDEGAPIDLF

SEQ ID NO: 42 - protein, 1422 aa, Streptococcus mutans serotype c
MLVKADSTDDRQQAVTESQASLVTTSEAAKETLTATDTSTATSATSQPTATVTDNVSTTNQSTNTTANTANFDVKPTTTSEQSKTDNSDKIIATSKAVNRLTATGKFVPANNNTAHSRTVTDKIVPIKPKIGKLKQPSSLSQDDIAALGNVKNIRKVNGKYYYYKEDGTLQKNYALNINGKTFFFDETGALSNNTLPSKKGNITNNDNTNSFAQYNQVYSTDAANFEHVDHYLTAESWYRPKYILKDGKTWTQSTEKDFRPLLMTWWPDQETQRQYVNYMNAQLGIHQTYNTATSPLQLNLAAQTIQTKIEEKITAEKNTNWLRQTISAFVKTQSAWNSDSEKPFDDHLQKGALLYSNNSKLTSQANSNYRILNRTPTNQTGKKDPRYTADRTIGGYEFLLANDVDNSNPVVQAEQLNWLHFLMNFGNIYANDPDANFDSIRVDAVDNVDADLLQIAGDYLKAAKGIHKNDKAANDHLSILEAWSYNDTPYLHDDGDNMINMDNRLRLSLLYSLAKPLNQRSGMNPLITNSLVNRTDDNAETAAVPSYSFIRAHDSEVQDLIRNIIRAEINPNVVGYSFTMEEIKKAFEIYNKDLLATEKKYTHYNTALSYALLLTNKSSVPRVYYGDMFTDDGQYMAHKTINYEAIETLLKARIKYVSGGQAMRNQQVGNSEIITSVRYGKGALKATDTGDRTTRTSGVAVIEGNNPSLRLKASDRVVVNMGAAHKNQAYRPLLLTTDNGIKAYHSDQEAAGLVRYTNDRGELIFTAADIKGYANPQVSGYLGVWVPVGAAADQDVRVAASTAPSTDGKSVHQNAALDSRVMFEGFSNFQAFATKKEEYTNVVIAKNVDKFAEWGVTDFEMAPQYVSSTDGSFLDSVIQNGYAFTDRYDLGISKPNKYGTADDLVKAIKALHSKGIKVMADWVPDQMYALPEKEVVTATRVDKYGTPVAGSQIKNTLYVVDGKSSGKDQQAKYGGAFLEELQAKYPELFARKQISTGVPMDPSVKIKQWSAKYFNGTNILGRGAGYVLKDQATNTYFSLVSDNTFLPKSLVNPNHGTSSSVTGLVFDGKGYVYYSTSGNQAKNAFISLGNNWYYFDNNGYMVTGAQSINGANYYFLSNGIQLRNAIYDNGNKVLSYYGNDGRRYENGYYLFGQQWRYFQNGIMAVGLTRIHGAVQYFDASGFQAKGQFITTADGKLRYFDRDSGNQISNRFVRNSKGEWFLFDHNGVAVTGTVTFNGQRLYFKPNGVQAKGEFIRDADGHLRYYDPNSGNEVRNRFVRNSKGEWFLFDHNGIAVTGTRVVNGQRLYFKSNGVQAKGELITERKGRIKYYDPNSGNEVRNRYVRTSSGNWYYFGNDGYALIGWHVVEGRRVYFDENGVYRYASHDQRNHWDYDYRRDFGRGSSSAVRFRHSRNGFFDNFFRF

SEQ ID NO: 43 - protein, 1033 aa, Lactobacillus reuteri
MGINGQQYYIDPTTGQPRKNFLLQNGNDWIYFDKDTGAGTNALKLQFDKGTISADEQYRRGNEAYSYDDKSIENVNGYLTADTWYRPKQILKDGTTWTDSKETDMRPILMVWWPNTVTQAYYLNYMKQYGNLLPASLPSFSTDADSAELNHYSELVQQNIEKRISETGSTDWLRTLMHEFVTKNSMWNKDSENVDYGGLQLQGGFLKYVNSDLTKYANSDWRLMNRTATNIDGKNYGGAEFLLANDIDNSNPVVQAEELNWLYYLMNFGTITGNNPEANFDGIRVDAVDNVDVDLLSIARDYFNAAYNMEQSDASANKHINILEDWGWDDPAYVNKIGNPQLTMDDRLRNAIMDTLSGAPDKNQALNKLITQSLVNRANDNTENAVIPSYNFVRAHDSNAQDQIRQAIQAATGKPYGEFNLDDEKKGMEAYINDQNSTNKKWNLYNMPSAYTILLTNKDSVPRVYYGDLYQDGGQYMEHKTRYFDTITNLLKTRVKYVAGGQTMSVDKNGILTNVRFGKGAMNATDTGTDETRTEGIGVVISNNTNLKLNDGESVVLHMGAAHKNQKYRAVILTTEDGVKNYTNDTDAPVAYTDANGDLHFTNTNLDGQQYTAVRGYANPDVTGYLAVWVPAGAADDQDARTAPSDEAHTTKTAYRSNAALDSNVIYEGFSNFIYWPTTESERTNVRIAQNADLFKSWGITTFELAPQYNSSKDGTFLDSIIDNGYAFTDRYDLGMSTPNKYGSDEDLRNALQALHKAGLQAIADWVPDQIYNLPGKEAVTVTRSDDHGTTWEVSPIKNVVYITNTIGGGEYQKKYGGEFLDTLQKEYPQLFSQVYPVTQTTIDPSVKIKEWSAKYFNGTNILHRGAGYVLRSNDGKYYNLGTSTQQFLPSQLSVQDNEGYGFVKEGNNYHYYDENKQMVKDAFIQDSVGNWYYFDKNGNMVANQSPVEISSNGASGTYLFLNNGTSFRSGLVKTDAGTYYYDGDGRMVRNQTVSDGAMTYVLDENGKLVSESFDSSATEAHPLKPGDLNGQK

SEQ ID NO: 44 - protein, 1043 aa, Lactobacillus reuteri
MGINGQQYYIDPTTGQPRKNFLLQSGNNWIYFDSDTGVGTNALELQFAKGTVSSNEQYRNGNAAYSYDDKSIENVNGYLTADTWYRPKQILKDGTTWTDSKETDMRPILMVWWPNTLTQAYYLNYMKQHGNLLPSALPFFNADADPAELNHYSEIVQQNIEKRISETGNTDWLRTLMHDFVTNNPMWNKDSENVNFSGIQFQGGFLKYENSDLTPYANSDYRLLGRMPINIKDQTYRGQEFLLANDIDNSNPVVQAEQLNWLYYLLNFGTITANNDQANFDSVRVDAPDNIDADLMNIAQDYFNAAYGMDSDAVSNKHINILEDWNHADPEYFNKIGNPQLTMDDTIKNSLNHGLSDATNRWGLDAIVHQSLADRENNSTENVVIPNYSFVRAHDNNSQDQIQNAIRDVTGKDYHTFTFEDEQKGIDAYIQDQNSTVKKYNLYNIPASYAILLTNKDTIPRVYYGDLYTDGGQYMEHQTRYYDTLTNLLKSRVKYVAGGQSMQTMSVGGNNNILTSVRYGKGAMTATDTGTDETRTQGIGVVVSNTPNLKLGANDKVVLHMGAAHKNQQYRAAVLTTTDGVINYTSDQGAPVAMTDENGDLYLSSHNLVVNGKEEADTAVQGYANPDVSGYLAVWVPVGASDNQDARTAPSTEKNSGNSAYRTNAAFDSNVIFEAFSNFVYTPTKESERANVRIAQNADFFASLGFTSFEMAPQYNSSKDRTFLDSTIDNGYAFTDRYDLGMSEPNKYGTDEDLRNAIQALHKAGLQVMADWVPDQIYNLPGKEVATVTRVDDRGNVWKDAIINNNLYVVNTIGGGEYQKKYGGAFLDKLQKLYPEIFTKKQVSTGVAIDPSQKITEWSAKYFNGTNILHRGSGYVLKADGGQYYNLGTTTKQFLPIQLTGEKKQGNEGFVKGNDGNYYFYDLAGNMVKNTFIEDSVGNWYFFDQDGKMVENKHFVDVDSYGEKGTYFFLKNGVSFRGGLVQTDNGTYYFDNYGKMVRNQTINAGAMIYTLDENGKLIKASYNSDAEYPTSTDVGKMLDQNKL

SEQ ID NO: 45 - protein, 684 aa, Thermoanaerobacterium thermosulfurigenes
MASDTAVSNVVNYSTDVIYQIVTDRFVDGNTSNNPTGDLYDPTHTSLKKYFGGDWQGIINKINDGYLTGMGVTAIWISQPVENIYAVLPDSTFGGSTSYHGYWARDFKRTNPYFGSFTDFQNLINTAHAHNIKVIIDFAPNHTSPASETDPTYAENGRLYDNGTLLGGYTNDTNGYFHHYGGTDFSSYEDGIYRNLFDLADLNQQNSTIDSYLKSAIKVWLDMGIDGIRLDAVKHMPFGWQKNFMDSILSYRPVFTFGEWFLGTNEIDVNNTYFANESGMSLLDFRFSQKVRQVFRDNTDTMYGLDSMIQSTASDYNFINDMVTFIDNHDMDRFYNGGSTRPVEQALAFTLTSRGVPAIYYGTEQYMTGNGDPYNRAMMTSFNTSTTAYNVIKKLAPLRKSNPAIAYGTTQQRWINNDVYIYERKFGNNVALVAINRNLSTSYNITGLYTALPAGTYTDVLGGLLNGNSISVASDGSVTPFTLSAGEVAVWQYVSSSNSPLIGHVGPTMTKAGQTITIDGRGFGTTSGQVLFGSTAGTIVSWDDTEVKVKVPSVTPGKYNISLKTSSGATSNTYNNINILTGNQICVRFVVNNASTVYGENVYLTGNVAELGNWDTSKAIGPMFNQVVYQYPTWYYDVSVPAGTTIQFKFIKKNGNTITWEGGSNHTYTVPSSSTGTVIVNWQQ

SEQ ID NO: 46 - protein, 1247 aa, Paenibacillus sp. 598K
MAGLGNVTGAVASGDSLTLTLDNGTSASDILELDVLSEELLRVDYRPSGAAPSPSTPMIDPDASWDAVGATIDTSGDPIVVTTPRMRIEIARTPARMTIKKADGTTLLWEPASGGVFEDGVRFQRGSTDNIYGIRSFNAQEDVGGLLRNSSDHPAHAGQQGDAGGPFMWSTAGYGVLVDSDGGYPYTDTTGKLEFYYGGTPTEGRRYTKTNVEYYIMVGEPKEIMASYAQVTGTAPMLPKWSLGFMNFEWGIDQDELEAHVDGYRARNIPIDAFALDYDWMDYGEDNYGEFRWNTDNFPDAATTQLKEDMEAEGIRLIGIRKPRIITRDFANQRTQQYYDADSNGYFYPGHNEYTDYFIPVTVRSFDPYQQASRDWWWQHSIDAFDKGIVGWWNDETDKVDSGSAQYWFGNFSTGFTSQAMYDGQRDYTNDGVRVWQTARSYYPGAQRYATTLWSGDIGTQFYKGELFNWAPGMQEQPRIMLSSANLGQPKWGMDTGGFNSLGGASGPNPSPELYTRWMQFGAFTPVFRVHGNYNQQRQPWLYGATAEEASKAVMHTRYSLLPYMYAYEREASETGLGLIKPLLFDYPNDPQAADYTEAWMFGDWLLVSPVLGEAQHSKQIYLPAGTWIDYHRGQTYSGGQTIHYPVNADTWTDVPLFVKQGAIIPNQQVLDYVDQQSVTTVNVDIFPSASETSFTYYEDDGSSYDYESGSSFEQRLAAQDLSSSVRVEVGAGSGSYTPDVQHYVLKIHGRAGSAVTAGGSALTGYGDLQALQAASGSGWASGRDIYGDVTYVKLPAASGSATVVEVSGSAPSAATHAIYEVEDASRSGATPTTRAGINTNHSGYSGSGFVDKLDVPGAAVTVYANAPVSGDYPVELRYANGSGSAKTLSVYVNAARVQQLSLADTGAWSQWGTQTTTLPLTAGQNIITYKYDSDAGDTGGVNLDYIRVPFAPTQAEYAAESAKLWGGAGTSQDHWFYKGAAFVDNLTGVGAEASFDVYAPSAGTYNLSLRYANGTGSTKTLSAIVNGGAASTVTLTSPGMNWNLWNEHTMTATLTAGRNTISFRRNSGNSGNVNLDRLAVSASAITTLASERNLLDNGDFERDTTYNSNWTQWQPSGQPSAFGIDSGNALHPPEGPARRNQRAYFHSDNAYQQSIHQVVDVPVNNATYRLEAKVRMKNTTPTTARAEVQGHGGSPIYANISNDGVWKTIVIDNINVTSGSVDVGFYVDSPGYTTLHIDEVTLTRAP

SEQ ID NO: 47 - protein, 216 aa, Aquifex aeolicus
MNLPDPKLLESWTPPQASEVYDAKGRLYGTIGIQKRFYVSIDKIPEHVINAFVATEDRNFWHHFGIDPVAIVRAAIVNYRAGRIVQGGSTITQQLAKNLFLTRERTLERKIKEALLAIKIERTFDKKKIMELYLNQIYLGSGAYGVEAAAQVYFGKHVWELSLDEAALLAALPKAPAKYNPFYHPERALQRRNLVLKRMLEEGYITPEQYEEAVNK

SEQ ID NO: 48 - protein, 278 aa, Rhizomucor miehei CAU432
MASMTGGQQMGRGSQTFYGINYGVNENSCPTVDSMKNDFNVLKPYTNRVRTFALSVCNQASLALAATQALGMRIYLGMWIDRPDTFDNEMNALKNILANNDVSNVDGLIVGSEVLYRGDTDPQSLANYIKQVKELVAPHGIKVATADVYYKFPEVVVKELDFLMMNAFPYWEGVTIDNAADTLMSHYDQVVGASLGKPVKISETGWPSAGGNFQSSVASVENENKYLHDVLCRVKQRNIDLLYFSAFDEPYRGGVEAHFGVLGSDRNTKPGITIEAGC

SEQ ID NO: 49 - protein, 687 aa, Unk Bacillus sp.
MAPDTSVSNKQNFSTDVIYQIFTDRFSDGNPANNPTGAAFDGSCTNLRLYCGGDWQGIINKINDGYLTGMGITAIWISQPVENIYSVINYSGVNNTAYHGYWARDFKKTNPAYGTMQDFKNLIDTAHAHNIKVIIDFAPNHTSPASSDDPSFAENGRLYDNGNLLGGYTNDTQNLFHHYGGTDFSTIENGIYKNLYDLADLNHNNSSVDVYLKDAIKMWLDLGVDGIRVDAVKHMPFGWQKSFMATINNYKPVFTFGEWFLGVNEISPEYHQFANESGMSLLDFRFAQKARQVFRDNTDNMYGLKAMLEGSEVDYAQVNDQVTFIDNHDMERFHTSNGDRRKLEQALAFTLTSRGVPAIYYGSEQYMSGGNDPDNRARLPSFSTTTTAYQVIQKLAPLRKSNPAIAYGSTHERWINNDVIIYERKFGNNVAVVAINRNMNTPASITGLVTSLRRASYNDVLGGILNGNTLTVGAGGAASNFTLAPGGTAVWQYTTDATTPIIGNVGPMMAKPGVTITIDGRGFGSGKGTVYFGTTAVTGADIVAWEDTQIQVKIPAVPGGIYDIRVANAAGAASNIYDNFEVLTGDQVTVRFVINNATTALGQNVFLTGNVSELGNWDPNNAIGPMYNQVVYQYPTWYYDVSVPAGQTIEFKFLKKQGSTVTWEGGANRTFTTPTSGTATVNVNWQP

SEQ ID NO: 50 - protein, 687 aa, Bacillus circulans
MAPDTSVSNKQNFSTDVIYQIFTDRFSDGNPANNPTGAAFDGTCTNLRLYCGGDWQGIINKINDGYLTGMGVTAIWISQPVENIYSIINYSGVNNTAYHGYWARDFKKTNPAYGTIADFQNLIAAAHAKNIKVIIDFAPNHTSPASSDQPSFAENGRLYDNGTLLGGYTNDTQNLFHHNGGTDFSTTENGIYKNLYDLADLNHNNSTVDVYLKDAIKMWLDLGIDGIRMDAVKHMPFGWQKSFMAAVNNYKPVFTFGEWFLGVNEVSPENHKFANESGMSLLDFRFAQKVRQVFRDNTDNMYGLKAMLEGSAADYAQVDDQVTFIDNHDMERFHASNANRRKLEQALAFTLTSRGVPAIYYGTEQYMSGGTDPDNRARIPSFSTSTTAYQVIQKLAPLRKCNPAIAYGSTQERWINNDVLIYERKFGSNVAVVAVNRNLNAPASISGLVTSLPQGSYNDVLGGLLNGNTLSVGSGGAASNFTLAAGGTAVWQYTAATATPTIGHVGPMMAKPGVTITIDGRGFGSSKGTVYFGTTAVSGADITSWEDTQIKVKIPAVAGGNYNIKVANAAGTASNVYDNFEVLSGDQVSVRFVVNNATTALGQNVYLTGSVSELGNWDPAKAIGPMYNQVVYQYPNWYYDVSVPAGKTIEFKFLKKQGSTVTWEGGSNHTFTAPSSGTATINVNWQP

SEQ ID NO: 51 - protein, 688 aa, Paenibacillus macerans
MSPDTSVDNKVNFSTDVIYQIVTDRFADGDRTNNPAGDAFSGDRSNLKLYFGGDWQGIIDKINDGYLTGMGVTALWISQPVENITSVIKYSGVNNTSYHGYWARDFKQTNDAFGDFADFQNLIDTAHAHNIKVVIDFAPNHTSPADRDNPGFAENGGMYDNGSLLGAYSNDTAGLFHHNGGTDFSTIEDGIYKNLYDLADINHNNNAMDAYFKSAIDLWLGMGVDGIRFDAVKHMPFGWQKSFVSSIYGGDHPVFTFGEWYLGADQTDGDNIKFANESGMNLLDFEYAQEVREVFRDKTETMKDLYEVLASTESQYDYINNMVTFIDNHDMDRFQVAGSGTRATEQALALTLTSRGVPAIYYGTEQYMTGDGDPNNRAMMTSFNTGTTAYKVIQALAPLRKSNPAIAYGTTTERWVNNDVLIIERKFGSSAALVAINRNSSAAYPISGLLSSLPAGTYSDVLNGLLNGNSITVGSGGAVTNFTLAAGGTAVWQYTAPETSPAIGNVGPTMGQPGNIVTIDGRGFGGTAGTVYFGTTAVTGSGIVSWEDTQIKAVIPKVAAGKTGVSVKTSSGTASNTFKSFNVLTGDQVTVRFLVNQANTNYGTNVYLVGNAAELGSWDPNKAIGPMYNQVIAKYPSWYYDVSVPAGTKLDFKFIKKGGGTVTWEGGGNHTYTTPASGVGTVTVDWQN

SEQ ID NO: 52 - protein, 793 aa, Cellvibrio japonicus
MNPVKREIHPDAVFYKEHKLRNDGLVITTNQGNIRLQFKSEAAIEVLYRADSKQLPSFALAQPESAIKAQLTETENHLQFSGGTLTARIQKRPFAISYYRDSELLLAEESGFQVNTDKINFRFYLSPGEKILGGGQRILGMDRRGQRFPLYNRAHYGYSDHSGQMYFGLPAIMSSKQYILVFDNSASGAMDIGKTESDILQLEAKSGRSAYILVAGNSYPSLIENFTQVTGRQPLPPRWALGSFASRFGYRSEAETRATVQKYKTEDFPLDTIVLDLYWFGKDIKGHMGNLDWDKENFPTPLDMMADFKQQGVKTVLITEPFVLTSSKRWDDAVKAKALAKDPQGQPKAFELYFGNGGIIDVFSKEGSRWFSSIYKDLSKQGVAGWWGDLGEPEMHPEDTQHAIGDADTVHNAYGHRWAEMLYQQQLDQFPELRPFIMMRAGFVGSQRYGMIPWTGDVSRTWGGLASQVELALQMSLLGFGYIHSDLGGFADGETLDKEMYIRWLQYGVFQPVYRPHGQDHIPSEPVFQDEETKAILRPLVKLRYRMLPYIYTAAYQNTLTGMPLMRPLFFSDEKNPALIDNKTSYFWGDSLLVTPITQAGVESVSIPAPKGVWFDFWKDTRYQTDGAPLTLPTDLHTIPVLVKAGAFMPYVPAVSTTEDYRSDSLEIHYYADASVPLAQGEIFEDDGKDPNSIKRNQFDLLTLQATHTDNQLHFQLARTGKGYRGMPERRATTLVIHNASDQYQHLDINGKTIAIAQADCASTPALACYDQERRQLQLVFTWGREALNLRLH

SEQ ID NO: 53 - protein, 675 aa, Bacillus clarkii
MSNATNDLSNVNYAEEVIYHIVTDRFKDGDPDNNPQGQLFSNGCSDLTKYCGGDWQGIIDEIESGYLPDMGITALWISPPVENVFDLHPEGFSSYHGYWARDFKKTNPFFGDFDDFSRLIETAHAHDIKVVIDFVPNHTSPVDIEDGALYDNGTLLGHYSTDANNYFYNYGGSDFSDYENSIYRNLYDLASLNQQHSFIDKYLKESIQLWLDTGIDGIRVDAVAHMPLGWQKAFISSVYDYNPVFTFGEWFTGAQGSNHYHHFVNNSGMSALDFRYAQVAQDVLRNQKGTMHDIYDMLASTQLDYERPQDQVTFIDNHDIDRFTVEGRDTRTTDIGLAFLLTSRGVPAIYYGTENYMTGKGDPGNRKMMESFDQTTTAYQVIQKLAPLRQENKAVAYGSTKERWINDDVLIYERSFNGDYLLVAINKNVNQAYTISGLLTEMPAQVYHDVLDSLLDGQSLAVKENGTVDSFLLGPGEVSVWQHISESGSAPVIGQVGPPMGKPGDAVKISGSGFGSEPGTVYFRDTKIDVLTWDDETIVITLPETLGGKAQISVTNSDGVTSNGYDFQLLTGKQESVRFVVDNAHTNYGENVYLVGNVPELGNWNPADAIGPMFNQVVYSYPTWYYDVSVPADTALEFKFIIVDGNGNVTWESGGNHNYRVTSGSTDTVRVSFRR

SEQ ID NO: 54 - protein, 685 aa, Bacillus circulans
MDPDTAVTNKQSFSTDVIYQVFTDRFLDGNPSNNPTGAAYDATCSNLKLYCGGDWQGLINKINDNYFSDLGVTALWISQPVENIFATINYSGVTNTAYHGYWARDFKKTNPYFGTMADFQNLITTAHAKGIKIVIDFAPNHTSPAMETDTSFAENGRLYDNGTLVGGYTNDTNGYFHHNGGSDFSSLENGIYKNLYDLADFNHNNATIDKYFKDAIKLWLDMGVDGIRVDAVKHMPLGWQKSWMSSIYAHKPVFTFGEWFLGSAASDADNTDFANKSGMSLLDFRFNSAVRNVFRDNTSNMYALDSMINSTATDYNQVNDQVTFIDNHDMDRFKTSAVNNRRLEQALAFTLTSRGVPAIYYGTEQYLTGNGDPDNRAKMPSFSKSTTAFNVISKLAPLRKSNPAIAYGSTQQRWINNDVYVYERKFGKSVAVVAVNRNLSTSASITGLSTSLPTGSYTDVLGGVLNGNNITSTNGSINNFTLAAGATAVWQYTTAETTPTIGHVGPVMGKPGNVVTIDGRGFGSTKGTVYFGTTAVTGAAITSWEDTQIKVTIPSVAAGNYAVKVAASGVNSNAYNNFTILTGDQVTVRFVVNNASTTLGQNLYLTGNVAELGNWSTGSTAIGPAFNQVIHQYPTWYYDVSVPAGKQLEFKFFKKNGSTITWESGSNHTFTTPASGTATVTVNWQ

SEQ ID NO: 55 - protein, 458 aa, Stevia rebaudiana
MENKTETTVRRRRRIILFPVPFQGHINPILQLANVLYSKGFAITIIHTNFNKPKTSNYPHFTFRFILDNDPQDERISNLPTHGPLAGMRIPIINEHGADELRRELELLMLASEEDEEVSCLITDALWYFAQSVADSLNLRRLVLMTSSLFNFHAHVSLPQFDELGYLDPDDKTRLEEQASGFPMLKVKDLKSAYSNWQILKEILGKMIKQTKASSGVIWNSFKELEESELETVIREIPAPSFLIPLPKHLTASSSSLLDHDRTVFQWLDQQPPGSVLYVSFGSTSEVDEKDFLEMARGLVDSGQSFLWVVRPGSVRGSTWVEPLPDGFLGERGRIVKWVPQQEVLAHGAIGAFWTHSGWNSTLESVCEGVPMIFSDFGLDQPLNARYMSDVLRIGVYLENGWERGEVARAIRRVMVDEEGEYIRENARVLKEKADVSLMKGGSSYEALESLVSYILSL

SEQ ID NO: 56 - protein, 1113 aa, Lachnoclostridium phytofermentans
MILKTLSAPIILENSNSTFTFLPGGDNFEWIHESIMINAFQGNTLDGSTNNLYLRIYKDNSLAFYPLIGMNSKSTIKSGTSTLIFEGTAEDISYTVTFRLTPYGIWFWDISLSGNCNKADIIYSQDIGVGTKGSVNSNELYLAQYLGHSIFQGDYGYVICSRQNMAQGDLFPYLQQGSLGIRSIAYSTDGTQFFGLSYKKTNIPEALYGDLPSKNKQYELAHTALQTEAFSLSGTKQFSFYGICKTNHPEVIREIEYIQELEKAYAYHESGEILPVNVPTLQNIGAPYASSRWDAKQVEHYFPKRLLEEKEEEALLSFFTPEKSHVVLQDKELTTERPHGHILMTNFDVTKVPQGVVSSTNYMYGAFNCQFVVGNTTYNKLLSNHRGLLNIQKDSGQRIFIKIGDCYRQLTLPAAYEMNVAGSTWYYQLDEDVLIITSFAMYNRPEIVLKVQSLGHKKYDFIVTHQLTVGPNEYENEIKLTREGNILQLSPTDPVVTNHFYPELSFRMRIPEDCTLSDDSIFFHNNTTINPSLLSIEILQKSSFDIVMQGFDTGNVIPFLDQYDYKEQLEAYRIYYDQLVCNFKLSAPDKIPLSAEKLNAIIHWYAHDALIHFASPHGLEQSGGAAWGTRDVCQGPIEFFLTTGHFDLVRHILITLYSHQIEGGFEWPQWFMFDHYPIHQEDCHGDVVFWPLKAISDYIQATGDTSILNELVDYRTAKDALPTNQPETILIHIKRAVTTIKNRYLSGTALISYAGGDWDDTLQPANSELKENLVSAWTQALAEQTLELLCSAIKGIDHDFSKELSHMANDIRTSFYQYLIKDGVIAGFLYRESEEHMKYMLHPDDTESSIHYRLLPLTRSIIAQLADFKLATRNLEIIDEHLACPDGVRLMDHPASYSGGISKIFLRAEQAANVGREISLQYVHAHIRYIEALATMGLSKKAWDALMRINPILLTDYVPNALTRQSNVYFSSSEGCFDDRYEYAKNFDKLRTGDINVKGGWRLYSSGPGIYIRRIIADLLGIRFGHNVIHIDPVVTKELDGVTLQFTCFGKTVFFTYHVDDTMDKHICVKSNNNILPGDNLNNIYRDGGIQIAKDVFLSAAMSDNNFHIYVKN

SEQ ID NO: 57 - protein, 437 aa, Pyrococcus abyssi
MKVLLLGFEFLPVKVGGLAEALTAISEALASLGHEVLVFTPSHGRFQGEEIGKIRVFGEEVQVKVSYEERGNLRIYRIGGGLLDSEDVYGPGWDGLIRKAVTFGRASVLLLNDLLREEPLPDVVHFHDWHTVFAGALIKKYFKIPAVFTIHRLNKSKLPAFYFHEAGLSELAPYPDIDPEHTGGYIADIVTTVSRGYLIDEWGFFRNFEGKITYVFNGIDCSFWNESYLTGSRDERKKSLLSKFGMDEGVTFMFIGRFDRGQKGVDVLLKAIEILSSKKEFQEMRFIIIGKGDPELEGWARSLEEKHGNVKVITEMLSREFVRELYGSVDFVIIPSYFEPFGLVALEAMCLGAIPIASAVGGLRDIITNETGILVKAGDPGELANAILKALELSRSDLSKFRENCKKRAMSFSWEKSAERYVKAYTGSIDRAFDFIL

SEQ ID NO: 58 - protein, 299 aa, Paecilomyces sp. thermophila
MQSYTLKDSLSGKDFLDAFSFFADRDPTNGFVHYVSREVAEGEGLVKVTSSGSVYLGVDHTNTLSLTDIGRKSVRLESTDKIDHGLVIADIKHMPGSICGAWPAFWTVGDTWPDDGEIDIIEGVNTQSQNTMVLHTKGNCEITSDDDQTGTTTSNQCSLDAGPAGCVVQGTPGSYGSSFNEQGGGVYAMQWTDEFIKLWFFPRSAIPKSIESDSPDVSEFGTPMGNFKGTCDIGKEFKPQKLVFDTTFCGDWAGSVYGQSDSCPLTKEDSLASCIDFVATKPEEFKEAYWEINYLKTYT

SEQ ID NO: 59 - protein, 565 aa, Homo sapiens
MPGGSGAAVAPAAGQGSHSRQKKTFFLGDGQKLKDWHDKEAIRRDAQRVGNGEQGRPYPMTDAERVDQAYRENGFNIYVSDKISLNRSLPDIRHPNCNSKRYLETLPNTSIIIPFHNEGWSSLLRTVHSVLNRSPPELVAEIVLVDDFSDREHLKKPLEDYMALFPSVRILRTKKREGLIRTRMLGASVATGDVITFLDSHCEANVNWLPPLLDRIARNRKTIVCPMIDVIDHDDFRYETQAGDAMRGAFDWEMYYKRIPIPPELQKADPSDPFESPVMAGGLFAVDRKWFWELGGYDPGLEIWGGEQYEISFKVWMCGGRMEDIPCSRVGHIYRKYVPYKVPAGVSLARNLKRVAEVWMDEYAEYIYQRRPEYRHLSAGDVAVQKKLRSSLNCKSFKWFMTKIAWDLPKFYPPVEPPAAAWGEIRNVGTGLCADTKHGALGSPLRLEGCVRGRGEAAWNNMQVFTFTWREDIRPGDPQHTKKFCFDAISHTSPVTLYDCHSMKGNQLWKYRKDKTLYHPVSGSCMDCSESDHRIFMNTCNPSSLTQQWLFEHTNSTVLEKFNRN

SEQ ID NO: 60 - protein, 203 aa, Staphylococcus aureus
MDNVDELRKIENKSSFVSADNMPEYVKGAFISMEDERFYNHHGFDLKGTTRALFSTISDRDVQGGSTITQQVVKNYFYDNDRSFTRKVKELFVAHRVEKQYNKNEILSFYLNNIYFGDNQYTLEGAANHYFGTTVNKNSTTMSHITVLQSAILASKVNAPSVYNINNMSENFTQRVSTNLEKMKQQNYINETQYQQAMSQLNR

SEQ ID NO: 61 - protein, 1693 aa, Leuconostoc mesenteroides
MGEKTSTGFITENGKTSFYSTSGYQAKDTFIQDGTNWYYFDNAGYMLTGKQNIHDKNYYFLPNGVELQDAYLFDGNQEFYYNKAGEQVMNQYYQDSQNQWHYFFENGRMAIGLTEVPNADGTHVTQYFDANGVQIKGTAIKDQNNQLRYFDEATGNMVVNSWGQLADKSWLYLNAQGVAVTGNQKIDGEEYYFNADGKQVKGNAIIDNNGDQRYYDGDKGVMVVNSWGELPDGSWLYLNDKGIAVTGRQVINNQVNFFGNDGKQIKDAFKLLSDGSWVYLDDKGLITTGAKVINGLNMFFDKDGHQIKGDASTDANGKRHYYDKNDGHLVTNSWGELPDGSWLYLEEQGDAVTGQRVIDGKTRYFDEDGKQIKNSLKTLANGDKIYLDGDGVAATGLQHVGDKIMYFDEDGKQVVGKFVSAKDGSWYYLNQDGVAAVGPSSINGQSLYFDQDGKQVKYNEVRNSDGTTNYYTGLTGEKLTQDFGELPDGSWIYLDAQGHTVTGAQIINGQNLYFKADGQQVKGHAYTDQLGHMRFYDPDSGDMLSNRFEQITPGVWAYFGADGVAITGQHDINGQKLFFDETGYQVKGSQRTIDGTLYSFDSQTGNQKRVQTTLLPQAGHYITKNGNDWQYDTNGELAKGLRQDSNGKLRYFDLTTGIQAKGQFVTIGQETYYFSKDHGDAQLLPMVTEGHYGTITLKQGQDTKTAWVYRDQNNTILKGLQNINGTLQFFDPYTGEQLKGGVAKYDDKLFYFESGKGNLVSTVAGDYQDGHYISQDGQTRYADKQNQLVKGLVTVNGALQYFDNATGNQIKNQQVIVDGKTYYFDDKGNGEYLFTNTLDMSTNAFSTKNVAFNHDSSSFDHTVDGFLTADTWYRPKSILANGTTWRDSTDKDMRPLITVWWPNKNVQVNYLNFMKANGLLTTAAQYTLHSDQYDLNQAAQDVQVAIERRIASEHGTDWLQKLLFESQNNNPSFVKQQFIWNKDSEYHGGGDAWFQGGYLKYGNNPLTPTTNSDYRQPGNAFDFLLANDVDNSNPVVQAENLNWLHYLMNFGTITAGQDDANFDSIRIDAVDFIHNDTIQRTYDYLRDAYQVQQSEAKANQHISLVEAGLDAGTSTIHNDALIESNLREAATLSLTNEPGKNKPLTNMLQDVDGGTLITDHTQNSTENQATPNYSIIHAHDKGVQEKVGAAITDATGADWTNFTDEQLKAGLELFYKDQRATNKKYNSYNIPSIYALMLTNKDTVPRMYYGDMYQDDGQYMANKSIYYDALVSLMTARKSYVSGGQTMSVDNHGLLKSVRFGKDAMTANDLGTSATRTEGLGVIIGNDPKLQLNDSDKVTLDMGAAHKNQKYRAVILTTRDGLATFNSDQAPTAWTNDQGTLTFSNQEINGQDNTQIRGVANPQVSGYLAVWVPVGASDNQDARTAATTTENHDGKVLHSNAALDSNLIYEGFSNFQPKATTHDELTNVVIAKNADVFNNWGITSFEMAPQYRSSGDHTFLDSTIDNGYAFTDRYDLGFNTPTKYGTDGDLRATIQALHHANMQVMADVVDNQVYNLPGKEVVSATRAGVYGNDDATGFGTQLYVTNSVGGGQYQEKYAGQYLEALKAKYPDLFEGKAYDYWYKNYANDGSNPYYTLSHGDRESIPADVAIKQWSAKYMNGTNVLGNGMGYVLKDWHNGQYFKLDGDKSTLPQI

SEQ ID NO: 62 - protein, 694 aa, Escherichia coli
MESKRLDNAALAAGISPNYINAHGKPQSISAETKRRLLDAMHQRTATKVAVTPVPNVMVYTSGKKMPMVVEGSGEYSWLLTTEEGTQYKGHVTGGKAFNLPTKLPEGYHTLTLTQDDQRAHCRVIVAPKRCYEPQALLNKQKLWGACVQLYTLRSEKNWGIGDFGDLKAMLVDVAKRGGSFIGLNPIHALYPANPESASPYSPSSRRWLNVIYIDVNAVEDFHLSEEAQAWWQLPTTQQTLQQARDADWVDYSTVTALKMTALRMAWKGFAQRDDEQMAAFRQFVAEQGDSLFWQAAFDALHAQQVKEDEMRWGWPAWPEMYQNVDSPEVRQFCEEHRDDVDFYLWLQWLAYSQFAACWEISQGYEMPIGLYRDLAVGVAEGGAETWCDRELYCLKASVGAPPDILGPLGQNWGLPPMDPHIITARAYEPFIELLRANMQNCGALRIDHVMSMLRLWWIPYGETADQGAYVHYPVDDLLSILALESKRHRCMVIGEDLGTVPVEIVGKLRSSGVYSYKVLYFENDHEKTFRAPKAYPEQSMAVAATHDLPTLRGYWECGDLTLGKTLGLYPDEVVLRGLYQDRELAKQGLLDALHKYGCLPKRAGHKASLMSMTPTLNRGLQRYIADSNSALLGLQPEDWLDMAEPVNIPGTSYQYKNWRRKLSATLESMFADDGVNKLLKDLDRRRRAAAKKK

SEQ ID NO: 63 - protein, 706 aa, Corynebacterium glutamicum
MTARRFLNELADLYGVATSYTDYKGAHIEVSDDTLVKILRALGVNLDTSNLPNDDAIQRQIALFHDREFTRPLPPSVVAVEGDELVFPVHVHDGSPADVHIELEDGTQRDVSQVENWTAPREIDGIRWGEASFKIPGDLPLGWHKLHLKSNERSAECGLIITPARLSTADKYLDSPRSGVMAQIYSVRSTLSWGMGDFNDLGNLASVVAQDGADFLLINPMHAAEPLPPTEDSPYLPTTRRFINPIYIRVEDIPEFNQLEIDLRDDIAEMAAEFRERNLTSDIIERNDVYAAKLQVLRAIFEMPRSSEREANFVSFVQREGQGLIDFATWCADRETAQSESVHGTEPDRDELTMFYMWLQWLCDEQLAAAQKRAVDAGMSIGIMADLAVGVHPGGADAQNLSHVLAPDASVGAPPDGYNQQGQDWSQPPWHPVRLAEEGYIPWRNLLRTVLRHSGGIRVDHVLGLFRLFVMPRMQSPATGTYIRFDHNALVGILALEAELAGAVVIGEDLGTFEPWVQDALAQRGIMGTSILWFEHSPSQPGPRRQEEYRPLALTTVTTHDLPPTAGYLEGEHIALRERLGVLNTDPAAELAEDLQWQAEILDVAASANALPAREYVGLERDQRGELAELLEGLHTFVAKTPSALTCVCLVDMVGEKRAQNQPGTTRDMYPNWCIPLCDSEGNSVLIESLRENELYHRVAKASKRD

SEQ ID NO: 64 - protein, 520 aa, Thermus thermophilus
MARFALVLHAHLPYVRAHGMWPFGEETLYEAMAETYLPLIRVLERLRAEGVEAPFTLGITPILAEQLADARIKEGFWAYAKDRLERAQGDYQRYRGTALEASARHQVAFWELTLDHFQRLSGDLVAAFRKAEEGGQVELITSNATHGYSPLLGYDEALWAQIKTGVSTYRRHFAKDPTGFWLPEMAYRPKGPWKPPVEGPPEGVRPGVDELLMRAGIRYTFVDAHLVQGGEPLSPYGEAALGPVESQEATYHVHELESGLRVLARNPETTLQVWSADYGYPGEGLYREFHRKDPLSGLHHWRVTHRKADLAEKAPYDPEAAFAKTEEHARHFVGLLERLAGRHPEGVILSPYDAELFGHWWYEGVAWLEAVLRLLAQNPKVRPVTAREAVQGPAVRTALPEGSWGRGGDHRVWLNEKTLDYWEKVYRAEGAMREAARRGVLPEGVLRQAMRELLLLEASDWPFLMETGQAEAYARERYEEHARAFFHLLKGASPEELRALEERDNPFPEADPRLYLFREA

SEQ ID NO: 65 - protein, 401 aa, Candida albicans
MGGGHNVAWDYDNNVIRGVNLGGWFVLEPYMTPSLFEPFQNGNDQSGVPVDEYHWTQTLGKEAASRILQKHWSTWITEQDFKQISNLGLNFVRIPIGYWAFQLLDNDPYVQGQVQYLEKALGWARKNNIRVWIDLHGAPGSQNGFDNSGLRDSYNFQNGDNTQVTLNVLNTIFKKYGGNEYSDVVIGIELLNEPLGPVLNMDKLKQFFLDGYNSLRQTGSVTPVIIHDAFQVFGYWNNFLTVAEGQWNVVVDHHHYQVFSGGELSRNINDHISVACNWGWDAKKESHWNVAGEWSAALTDCAKWLNGVNRGARYEGAYDNAPYIGSCQPMLDISQWSDEHKTDTRRYIEAQLDAFEYTGGWVFWSWKTENAPEWSFQTLTYNGLFPQPVTDRQFPNQCGFH

SEQ ID NO: 66 - protein, 524 aa, Cyanobacterium sp. CLg1
MLNICFVSTEVAPYSKTGGLGDVTEGLPEELAKIGHKVCTVAPRFDQYEDAWDTEIIQPVNYGQEKTNVRYFHSYKKGVDHIWVDHHVYLSKTPLVNKKLYGPKDSVDYIDNVERFAMLSQAALAVPLLVPLGAKGSQGVMGENTIFVCNDWHTSLLPLYLKEYYQSQGIFVNAKTVMLLHNIAFQGRFPSSKFDALNLPAKYLSDLSFNTQFAPPPLDEKTTEPITSPEPMYMLNWLKAGFLNCDQALTVSPNFAHEVTSSPMGGVELDAVARDVGLTGITNGTKIETWNPQKDKFILANYNSRTINSGKKLCKVALQKECGLTVDPDIPLFGFIGRLENQKGADVIIAAMPKLKQLNCQVVILGIGSPKLEQELESVADKYPFAKGVARFDSKLAHFITAGADYCLMPSRFEPCGLNQLYAMMYGTIPVVAPVGGLVDTVPPQFGFLMNKIPMPKIPGVTVSEELLQQGVDAMIVGMKKALQEYGTPKFKKMRLDCMANDVSWKKPAAKYVDIFEQLVNSQV

SEQ ID NO: 67 - protein, 806 aa, Coffea arabica
MAERVLTRVHSLRERLDATLAAHRNDVLLFMSRLETHGKGILKPHQLLAEFEEINKDGKQKIHDHAFEEVLKSTQEAIVLPPWVALAIRLRPGVWEYVRVNVHALVVEELTVPEYLHFKEELVDGSKNGNFVLELDFEPFTASFPKPTLTKYIGDGVEFLNRHLSAKMFHDKESMAPLLDFLRVHQYKGKTMMLNDRIKDLNTLQAVLRKAEEYLTTLSADTPYSEFEHKFQEIGLERGWGDTAERVLEMICMLLDLLGAPDSCTLEKFLGRIPMVFNVVILSPHGYFAQENVLGYPDTGGQVVYILDQVPALEREMLKRIKEQGLDVKPRILIITRLLPDAPGTTCGQRLEKVYGSEYSHILRVPFRTEKGVVRKWISRFEVWPYMETFTEDVAKEVTAELQAKPDLVIGNYSEGNLVASLLAHKLGVTQCTIAHALEKTKYPDSDIYLSKFDEKYHFSCQFTADLIAMNHTDFIITSTFQEIAGSKDTVGQYESHMAFTMPGLYRVVHGIDVFDPKFNIVSPGADTNLYFPHTEKEKRLTSFHPEIEELLFSDVENEEHLCVLKDKKKPILFTMARLDRVKNLTGLVELYAKNPKLRELVNLVVVGGDRRKESKDLEEQAEMKKMYSLIETYNLNGQFRWISSQMNRVRNGELYRYIADTRGAFVQPAFYEAFGLTVVEAMTCGLPTFATNHGGPAEIIIHGKSGFHIDPYHGEQVSELLANFFERCKKEPSYWDTISAGGLKRIQEKYTWQIYSDRLLTLAGVYGFWKCVSKLDRQEIRRYLEMFYALKYRKLAEAVPLAVDQ

SEQ ID NO: 68 - protein, 441 aa, Thermotoga maritima
MIGYQIYVRSFRDGNLDGVGDFRGLKNAVSYLKELGIDFVWLMPVFSSISFHGYDVVDFYSFKAEYGSEREFKEMIEAFHDSGIKVVLDLPIHHTGFLHTWFQKALKGDPHYRDYYVWANKETDLDERREWDGEKIWHPLEDGRFYRGLFGPFSPDLNYDNPQVFDEMKRLVLHLLDMGVDGFRFDAAKHMRDTIEQNVRFWKYFLSDLKGIFLAEIWAEARMVDEHGRIFGYMLNFDTSHCIKEAVWKENTRVLIESIERAVIGKDYLPVNFTSNHDMSRLASFEGGFSKEKIKLSISILFTLPGVPLVFYGDELGMKGVYQKPNTEVVLDPFPWNESMCVEGQTFWKWPAYNGPFSGISVEYQKRDPDSILSHTLGWTRFRKENQWIDRAKLEFLCKEDKFLVYRLYDDQHSLKVFHNLSGEEVVFEGVKMKPYKTEVV

SEQ ID NO: 69 - protein, 700 aa, Paenibacillus sp. 598K
MASGDVERVYTDKSRYDPGDPVTITAQVRNTDSIAWTGTVQLRIAHLEDQVHTASQTVTIGGGQTEDVQFTWTSPATDFKGYLADIDAGALGSGTTAIDVSSDFARYPRYGYVSEFHPDETAAESAAKIDELAQDYKINAWQFYDWMWRHETMIKRTGSAIDSTWIDLFNREISWQTIQNQIDAVHDQNGAAMAYAMIYAAREDYESYGVDSEWGIYQDPNHLQQLDVDFGNNSTYMYLFNPANTDWQSFIHAQYLDAINTAGFDGIHVDQMGQRNNVYDYWGNPLNFPATFTPFINEAKSTLTANNSDKDRITYNIVDGTVDGWAANEVSGGADVDFLYSEIWHLSDSYIQLKDYIDSLKANSGNKAVVLAAYMNYRENIGDRYEAESAALTNTATNNNHSGYTGSGFVDQFADPGDAVTFSITVPEEGYYSLVFRFANNSGFTATRNLYVDSAFEIELPFQNQPSWSAWSHETWHQVYLTPGTHTIKLAYDAGNVGAINLDSLTLGTFDPHSIRLANAMMAASGATHIELGEDSQMLAHEYYPNRSKSMRSELKEALKQHYNFITAYENLLFDPDVVDNDSGSQFVNLDMVSASGDASPNTVWHQVKRTPEYNIVHFINLANNDNQWRNSANPPTLHTNIATKVYVSPDETISGVYLASPDHDDNRTQSLAYTTGTDIHGDYVAFTLPSLEYWSMVYM

SEQ ID NO: 70 - protein, 397 aa, Rhodothermus marinus
MSLVVFPFKHEHPEVLLHNVRVAAAHPRVHEVLCIGYERDQTYEAVERAAPEISRATGTPVSVRLQERLGTLRPGKGDGMNTALRYFLEETQWERIHFYDADITSFGPDWITKAEEAADFGYGLVRHYFPRASTDAMITWMITRTGFALLWPHTELSWIEQPLGGELLMRREVAAMLYEDERVRRRSDWGIDTLYTFVTVQQGVSIYECYIPEGKAHRLYGGLDDLRTMLVECFAAIQSLQHEVVGQPAIHRQEHPHRVPVHIAERVGYDVEATLHRLMQHWTPRQVELLELFTTPVREGLRTCQRRPAFNFMDEMAWAATYHVLLEHFQPGDPDWEELLFKLWTTRVLNYTMTVALRGYDYAQQYLYRMLGRYRYQAALENGRGHPVPPRAALSTA

SEQ ID NO: 71 - protein, 274 aa, Homo sapiens
MSLPACPEESPLLVGPMLIEFNMPVDLELVAKQNPNVKMGGRYAPRDCVSPHKVAIIIPFRNRQEHLKYWLYYLHPVLQRQQLDYGIYVINQAGDTIFNRAKLLNVGFQEALKDYDYTCFVFSDVDLIPMNDHNAYRCFSQPRHISVAMDKFGFSLPYVQYFGGVSALSKQQFLTINGFPNNYWGWGGEDDDIFNRLVFRGMSISRPNAVVGRCRMIRHSRDKKNEPNPQRFDRIAHTKETMLSDGLNSLTYQVLDVQRYPLYTQITVDIGTPS

SEQ ID NO: 72 - protein, 660 aa, Homo sapiens
MDDWKPSPLIKPFGARKKRSWYLTWKYKLTNQRALRRFCQTGAVLFLLVTVIVNIKLILDTRRAISEANEDPEPEQDYDEALGRLEPPRRRGSGPRRVLDVEVYSSRSKVYVAVDGTTVLEDEAREQGRGIHVIVLNQATGHVMAKRVFDTYSPHEDEAMVLFLNMVAPGRVLICTVKDEGSFHLKDTAKALLRSLGSQAGPALGWRDTWAFVGRKGGPVFGEKHSKSPALSSWGDPVLLKTDVPLSSAEEAECHWADTELNRRRRRFCSKVEGYGSVCSCKDPTPIEFSPDPLPDNKVLNVPVAVIAGNRPNYLYRMLRSLLSAQGVSPQMITVFIDGYYEEPMDVVALFGLRGIQHTPISIKNARVSQHYKASLTATFNLFPEAKFAVVLEEDLDIAVDFFSFLSQSIHLLEEDDSLYCISAWNDQGYEHTAEDPALLYRVETMPGLGWVLRRSLYKEELEPKWPTPEKLWDWDMWMRMPEQRRGRECIIPDVSRSYHFGIVGLNMNGYFHEAYFKKHKFNTVPGVQLRNVDSLKKEAYEVEVHRLLSEAEVLDHSKNPCEDSFLPDTEGHTYVAFIRMEKDDDFTTWTQLAKCLHIWDLDVRGNHRGLWRLFRKKNHFLMVGVPASPYSVKKPPSVTPIFLEPPPKEEGAPGAPEQT

SEQ ID NO: 73 - protein, 411 aa, Drosophila melanogaster
MLINHLIVVLLISLVGTGGAEDDGLCSADQKSCAQSEPDQINEDEFSFKIRRQIEKANADYKPCSSDPQDSDCSCHANVLKRDLAPYKSTGVTRQMIESSARYGTKYKIYGHRLYRDANCMFPARCEGIEHFLLPLVATLPDMDLIINTRDYPQLNAAWGNAAGGPVFSFSKTKEYRDIMYPAWTFWAGGPATKLHPRGIGRWDQMREKLEKRAAAIPWSQKRSLGFFRGSRTSDERDSLILLSRRNPELVEAQYTKNQGWKSPKDTLDAPAADEVSFEDHCKYKYLFNFRGVAASFRLKHLFLCKSLVFHVGDEWQEFFYDQLKPWVHYVPLKSYPSQQEYEHILSFFKKNDALAQEIAQRGYDFIWEHLRMKDIKCYWRKLLKRYVKLLQYEVKPEDQLIYIGPKKDEL

SEQ ID NO: 74 - protein, 321 aa, Mus musculus
MHCRLFRGMAGALFTLLCVGLLSLRYHSSLSQRMIQGALRLNQRNPGPLELQLGDIFIAVKTTWAFHRSRLDLLLDTWVSRIRQQTFIFTDSPDERLQERLGPHLVVTNCSAEHSHPALSCKMAAEFDAFLVSGLRWFCHVDDDNYVNPKALLQLLKTFPQDRDVYVGKPSLNRPIHASELQSKNRTKLVRFWFATGGAGFCINRQLALKMVPWASGSHFVDTSALIRLPDDCTVGYIIECKLGGRLQPSPLFHSHLETLQLLGAAQLPEQVTLSYGVFEGKLNVIKLPGPFSHEEDPSRFRSLHCLLYPDTPWCPLLAAP

SEQ ID NO: 75 - protein, 442 aa, Saccharomyces cerevisiae
MALFLSKRLLRFTVIAGAVIVLLLTLNSNSRTQQYIPSSISAAFDFTSGSISPEQQVISEENDAKKLEQSALNSEASEDSEAMDEESKALKAAAEKADAPIDTKTTMDYITPSFANKAGKPKACYVTLVRNKELKGLLSSIKYVENKINKKFPYPWVFLNDEPFTEEFKEAVTKAVSSEVKFGILPKEHWSYPEWINQTKAAEIRADAATKYIYGGSESYRHMCRYQSGFFWRHELLEEYDWYWRVEPDIKLYCDINYDVFKWMQENEKVYGFTVSIHEYEVTIPTLWQTSMDFIKKNPEYLDENNLMSFLSNDNGKTYNLCHFWSNFEIANLNLWRSPAYREYFDTLDHQGGFFYERWGDAPVHSIAAALFLPKDKIHYFSDIGYHHPPYDNCPLDKEVYNSNNCECDQGNDFTFQGYSCGKEYYDAQGLVKPKNWKKFRE

SEQ ID NO: 76 - protein, 968 aa, Hordeum vulgare
MATASPPLATAFRPLAAAGGSGGLVVGAGAGAAPRRGRRGLVVRSVASDREVRGPASTEEELSAVLTSIDSSAIASNIQHHADFTPLFSPEHSSPLKAYHATAKSVFDSLIMNWNATYDYYNKVNAKQAYYLSMEFLQGRALTNAIGNLELTGQYAEALKQLGHNLEDVASQEPDPALGNGGLGRLASCFLDSLATLNYPAWGYGLRYRYGLFKQIITKDGQEEVAENWLEMGNPWEIVRNDVSYPVKFYGKVVEGTDGRKHWIGGENIKAVAHDVPIPGYKTKTTNNLRLWSTTVPSQNFDLGAFNAGDHAKANEAHLNAEKICHVLYPGDESSEGKILRLKQQYTLCSASLQDIISRFESRAGDSLNWEDFPSKVAVQMNDTHPTLCIPELMRILMDIKGLSWNEAWSITERTVAYTNHTVLPEALEKWSLDIMQKLLPRHVEIIETIDEELMNNIVSKYGTADISLLKQKLKDMRILDNVDLPASVAKLFIKPKEKRGKLLVESLESIAEADEKTESQEVENILSETTEKKAESDSEEAPDAEKEDPEYELDPFAKYDPQFPRVVRMANLCVVGGHSVNGVAEIHSEIVKQDVFNSFYEMWPTKFQNKTNGVTPRRWIRFCNPELSTIISKWIGSDDWILNTDKLAGLKKFADDEDLQSEWRTAKRNNKMKVVSLIRDKTGYIVSPDAMFDVQVKRIHEYKRQLLNILGIVYRYKKMKEMSAKDRRKSFVPRVCIFGGKAFATYVQAKRIVKFITDVAATVNYDPDIGDLLKVVFVPDYNVSVAETLIPASELSQHISTAGMEASGTSNMKFAMNGCLLIGTLDGANVEIREEVGEENFFLFGAHAPEIAGLRQERAEGKFVPDLRFEEVKEYVRSGVFGTSNYDELMGSLEGNEGYGRADYFLVGKDFPSYIECQEKVDEAYRDQKLWTRMSILNTAGSPKFSSDRTIHEYAKDIWDISPVIMP

SEQ ID NO: 77 - protein, 797 aa, Lactobacillus johnsonii
MLENKNHKKISLSGKSLLMGTLSTAAIVLSASTANAATINADNVNENQTVEVTASSVNNENNKQVTEKDSADKSTSDVAEDANTKKSNENTETTEKNTQTVVTNAPVSDVKNTNTVTAETPVDKVVNNSDQKTTNAATTDTKKDDVKQVEKKDSVDKTNAEENKDSSVKPAENATKAELKGQVKDIVEESGVDTSKLTNDQINELNKINFSKEAKSGTQLTYNDFKKIAKTLIEQDARYAIPFFNASKIKNMPAAKTLDAQSGKVEDLEIWDSWPVQDAKTGYVSNWNGYQLVIGMMGVPNVNDNHIYLLYNKYGDNDFNHWKNAGPIFGLGTPVIQQWSGSATLNKDGSIQLYYTKVDTSDNNTNHQKLASATVYLNLEKDQDKISIAHVDNDHIVFEGDGYHYQTYDQWKETNKGADNIAMRDAHVIDDDNGNRYLVFEASTGTENYQGDDQIYQWLNYGGTNKDNLGDFFQILSNSDIKDRAKWSNAAIGIIKLNDDVKNPSVAKVYSPLISAPMVSDEIERPDVVKLGNKYYLFAATRLNRGSNDDAWMATNKAVGDNVAMIGYVSDNLTHGYVPLNESGVVLTASVPANWRTATYSYYAVPVEGRDDQLLITSYITNRGEVAGKGMHATWAPSFLLQINPDNTTTVLAKMTNQGDWIWDDSSENPDMMGVLEKDAPNSAALPGEWGKPVDWDLIGGYNLKPHQPVTPIPNVPTTPETPTTPDKPEVPTTPEVPTTPETPTPEAPKNPVKKTSQSKLPKAGDKNSFAAVVLGAVSSILGAVGLTGVSKRKRNN

SEQ ID NO: 78 - protein, 389 aa, Caenorhabditis elegans
MRVSKVLTLASFISVCSYSEAKSNETDPNGYIVFCPCMGRFGNQVDQFLGVLAFAKALDRTLVLPNFIEFKHPETKMIPFEFLFQVGTVAKYTRVVTMQEFTKKIMPTVWPPEKRKAFCWTPRQAIYDKSAEPGCHSKEGNPFGPYWDQIDVSFVGDEYFGDIPGGFDLNQMGSRKKWLEKFPSEEYPVLAFSSAPAPFPSKGKVWSIQKYLRWSSRITEQAKKFISANLAKPFVAVHLRNDADWVRVCEHIDTTTNRPLFASEQCLGEGHHLGTLTKEICSPSKQQILEQIVEKVGSIGAKSVFVASDKDHMIDEINEALKPYEIEAHRQEPDDMYTSLAIMGRADLFVGNCVSTFSHIVKRERDHAGQSPRPSAFFGIRAVKRHIDL

SEQ ID NO: 79 - protein, 354 aa, Homo sapiens
MAEVLRTLAGKPKCHALRPMILFLIMLVLVLFGYGVLSPRSLMPGSLERGFCMAVREPDHLQRVSLPRMVYPQPKVLTPCRKDVLVVTPWLAPIVWEGTFNIDILNEQFRLQNTTIGLTVFAIKKYVAFLKLFLETAEKHFMVGHRVHYYVFTDQPAAVPRVTLGTGRQLSVLEVRAYKRWQDVSMRRMEMISDFCERRFLSEVDYLVCVDVDMEFRDHVGVEILTPLFGTLHPGFYGSSREAFTYERRPQSQAYIPKDEGDFYYLGGFFGGSVQEVQRLTRACHQAMMVDQANGIEAVWHDESHLNKYLLRHKPTKVLSPEYLWDQQLLGWPAVLRKLRFTAVPKNHQAVRNP

SEQ ID NO: 80 - protein, 295 aa, Tropaeolum majus
MPPNILSIFLHLLPILMFSSSCLGQGPPSPGYYPSSQITSLGFDQGYTNLWGPQHQRVDQGSLTIWLDSTSGSGFKSINRYRSGYFGANIKLQSGYTAGVITSFYLSNNQDYPGKHDEIDIEFLGTIPGKPYTLQTNVFIEGSGDYNIIGREMRIHLWFDPTQDYHNYAIYWTPSEIIFFVDDVPIRRYPRKSDATFPLRPLWVYGSVWDASSWATENGKYKADYRYQPFVGKYEDFKLGSCTVEAASSCNPASVSPYGQLSQQQVAAMEWVQKNYMVYNYCDDPTRDHTLTPEC

SEQ ID NO: 81 - protein, 333 aa, Oryctolagus cuniculus
MTDQAFVTLTTNDAYAKGALVLGSSLKQHRTSRRLAVLTTPQVSDTMRKALEIVFDEVITVDILDSGDSAHLTLMKRPELGVTLTKLHCWSLTQYSKCVFMDADTLVLANIDDLFEREELSAAPDPGWPDCFNSGVFVYQPSVETYNQLLHVASEQGSFDGGDQGLLNTFFNSWATTDIRKHLPFIYNLSSISIYSYLPAFKAFGANAKVVHFLGQTKPWNYTYDTKTKSVRSEGHDPTMTHPQFLNVWWDIFTTSVVPLLQQFGLVQDTCSYQHVEDVSGAVSHLSLGETPATTQPFVSSEERKERWEQGQADYMGADSFDNIKKKLDTYLQ

SEQ ID NO: 82 - protein, 428 aa, Mus musculus
MLRNLFRRRLFSCPTKYYFMLLVLSLITFSVLRIHQKPEFFSVRHLELAGDDPYSNVNCTKILQGDPEEIQKVKLEILTVQFKKRPRRTPHDYINMTRDCASFIRTRKYIVEPLTKEEVGFPIAYSIVVHHKIEMLDRLLRAIYMPQNFYCIHVDRKAEESFLAAVQGIASCFDNVFVASQLESVVYASWSRVKADLNCMKDLYRMNANWKYLINLCGMDFPIKTNLEIVRKLKCSTGENNLETEKMPPNKEERWKKRYTVVDGKLTNTGIVKAPPPLKTPLFSGSAYFVVTREYVGYVLENENIQKLMEWAQDTYSPDEFLWATIQRIPEVPGSFPSSNKYDLSDMNAIARFVKWQYFEGHVSNGAPYPPCSGVHVRSVCVFGAGDLSWMLRQHHLFANKFDMDVDPFAIQCLDEHLRHKALENLEH

SEQ ID NO: 83 - protein, 424 aa, Caenorhabditis elegans
MHFFPIQLLVLFFAEKIAFAENSDQTVSRVDSNRYSVAAEKKFLLYDVNFGEGFNLRRDVYMRVANTVRSLRDSGENYILVLPPWGRLHHWKRMEVALSWRLFFDLESLNRFIPVIEFEDFLDENRPIDQVIYLQHYAEGWGTEYVRKFEKRSCLPPAESHYKQVEEFKWKGWFYSYEDVYSRNFQCVSIQGDSGTLKDLLKHSNFSESTSIMVDRAETILHEHYGEVDYWKARRSMRYSNDLVDVADAFRKKYLDSDDKRDKTKLVDDWTKEKPRRTAIGGPYLGIHWRRRDFLYARRAQLPTIPGTAKILQDLCKKLDLQKIYLATDAPDQEVDELKALLNGELEVYRFTDTQKLNDGQIAIIDQYLCAHAAYFIGSYESTFTFRIQEDREIIGFPISTTFNRLCPDTEPTCEQPAKWKIVY

SEQ ID NO: 84 - protein, 576 aa, Arabidopsis thaliana
MSILLRPSSSPSLCSSLKLFRLSSPDSLIDAAVLRNRTKPSQSFRMEVVSSNSTCLSSISVGEDFPSEYEQWLPVPDPESRRRAGVLLHPTSFRGPHGIGDLGEEAFRFIDWLHSTGCSVWQVLPLVPPDEGGSPYAGQDANCGNTLLISLDELVKDGLLIKDELPQPIDADSVNYQTANKLKSPLITKAAKRLIDGNGELKSKLLDFRNDPSISCWLEDAAYFAAIDNTLNAYSWFEWPEPLKNRHLSALEAIYESQKEFIDLFIAKQFLFQRQWQKVREYARRQGVDIMGDMPIYVGYHSADVWANKKHFLLNKKGFPLLVSGVPPDLFSETGQLWGSPLYDWKAMESDQYSWWVNRIRRAQDLYDECRIDHFRGFAGFWAVPSEAKVAMVGRWKVGPGKSLFDAISKGVGKIKIIAEDLGVITKDVVELRKSIGAPGMAVLQFAFGGGADNPHLPHNHEVNQVVYSGTHDNDTIRGWWDTLDQEEKSKAMKYLSIAGEDDISWSVIQAAFSSTAQTAIIPMQDILGLGSSARMNTPATEVGNWGWRIPSSTSFDNLETESDRLRDLLSLYGRL

SEQ ID NO: 85 - protein, 853 aa, Haemophilus influenzae
MRIAKLILNTLLTLCILGLVAGGMLYFHLKSELQQPMQIYTADGKLIGEVGEQRRIPVKLADVPQRLIDAFLATEDSRFYDHHGLDPIGIARALFVAVSNGGASQGASTITQQLARNFFLTSEKTIIRKAREAVLAVEIENTLNKQEILELYLNKIFLGYRSYGVAAAAQTYFGKSLNELTLSEMAIIAGLPKAPSTMNPLYSLKRSEERRNVVLSRMLDEKYISKEEYDAALKEPIVASYHGAKFEFRADYVTEMVRQEMVRRFGEENAYTSGYKVFTTVLSKDQAEAQKAVRNNLIDYDMRHGYRGGAPLWQKNEAAWDNDRIVGFLRKLPDSEPFIPAAVIGIVKGGADILLASGEKMTLSTNAMRWTGRSNPVKVGEQIWIHQRANGEWQLGQIPAANSALVSLNSDNGAIEAVVGGFSYEQSKFNRATQSLVQVGSSIKPFIYAAALEKGLTLSSVLQDSPISIQKPGQKMWQPKNSPDRYDGPMRLRVGLGQSKNIIAIRAIQTAGIDFTAEFLQRFGFKRDQYFASEALALGAASFTPLEMARAYAVFDNGGFLIEPYIIEKIQDNTGKDLFIANPKIACIECNDIPVIYGETKDKINGFANIPLGENALKPTDDSTNGEELDQQPETVPELPELQSNMTALKEDAIDLMAAAKNASSKIEYAPRVISGELAFLIRSALNTAIYGEQGLDWKGTSWRIAQSIKRSDIGGKTGTTNSSKVAWYAGFGANLVTTTYVGFDDNKRVLGRGEAGAKTAMPAWITYMKTALSDKPERKLSLPPKIVEKNIDTLTGLLSPNGGRKEYFIAGTEPTRTYLSEMQERGYYVPTELQQRLNNEGNTPATQPQELF

SEQ ID NO: 86 - protein, 584 aa, Gluconacetobacter diazotrophicus
MAHVRRKVATLNMALAGSLLMVLGAQSALAQGNFSRQEAARMAHRPGVMPRGGPLFPGRSLAGVPGFPLPSIHTQQAYDPQSDFTARWTRADALQIKAHSDATVAAGQNSLPAQLTMPNIPADFPVINPDVWVWDTWTLIDKHADQFSYNGWEVIFCLTADPNAGYGFDDRHVHARIGFFYRRAGIPASRRPVNGGWTYGGHLFPDGASAQVYAGQTYTNQAEWSGSSRLMQIHGNTVSVFYTDVAFNRDANANNITPPQAIITQTLGRIHADFNHVWFTGFTAHTPLLQPDGVLYQNGAQNEFFNFRDPFTFEDPKHPGVNYMVFEGNTAGQRGVANCTEADLGFRPNDPNAETLQEVLDSGAYYQKANIGLAIATDSTLSKWKFLSPLISANCVNDQTERPQVYLHNGKYYIFTISHRTTFAAGVDGPDGVYGFVGDGIRSDFQPMNYGSGLTMGNPTDLNTAAGTDFDPSPDQNPRAFQSYSHYVMPGGLVESFIDTVENRRGGTLAPTVRVRIAQNASAVDLRYGNGGLGGYGDIPANRADVNIAGFIQDLFGQPTSGLAAQASTNNAQVLAQVRQFLNQ

SEQ ID NO: 87 - protein, 636 aa, Neisseria polysaccharea
MLTPTQQVGLILQYLKTRILDIYTPEQRAGIEKSEDWRQFSRRMDTHFPKLMNELDSVYGNNEALLPMLEMLLAQAWQSYSQRNSSLKDIDIARENNPDWILSNKQVGGVCYVDLFAGDLKGLKDKIPYFQELGLTYLHLMPLFKCPEGKSDGGYAVSSYRDVNPALGTIGDLREVIAALHEAGISAVVDFIFNHTSNEHEWAQRCAAGDPLFDNFYYIFPDRRMPDQYDRTLREIFPDQHPGGFSQLEDGRWVWTTFNSFQWDLNYSNPWVFRAMAGEMLFLANLGVDILRMDAVAFIWKQMGTSCENLPQAHALIRAFNAVMRIAAPAVFFKSEAIVHPDQVVQYIGQDECQIGYNPLQMALLWNTLATREVNLLHQALTYRHNLPEHTAWVNYVRSHDDIGWTFADEDAAYLGISGYDHRQFLNRFFVNRFDGSFARGVPFQYNPSTGDCRVSGTAAALVGLAQDDPHAVDRIKLLYSIALSTGGLPLIYLGDEVGTLNDDDWSQDSNKSDDSRWAHRPRYNEALYAQRNDPSTAAGQIYQGLRHMIAVRQSNPRFDGGRLVTFNTNNKHIIGYIRNNALLAFGNFSEYPQTVTAHTLQAMPFKAHDLIGGKTVSLNQDLTLQPYQVMWLEIA

SEQ ID NO: 88 - protein, 558 aa, Arabidopsis thaliana
MDQNSYRRRSSPIRTTTGGSKSVNFSELLQMKYLSSGTMKLTRTFTTCLIVFSVLVAFSMIFHQHPSDSNRIMGFAEARVLDAGVFPNVTNINSDKLLGGLLASGFDEDSCLSRYQSVHYRKPSPYKPSSYLISKLRNYEKLHKRCGPGTESYKKALKQLDQEHIDGDGECKYVVWISFSGLGNRILSLASVFLYALLTDRVLLVDRGKDMDDLFCEPFLGMSWLLPLDFPMTDQFDGLNQESSRCYGYMVKNQVIDTEGTLSHLYLHLVHDYGDHDKMFFCEGDQTFIGKVPWLIVKTDNYFVPSLWLIPGFDDELNKLFPQKATVFHHLGRYLFHPTNQVWGLVTRYYEAYLSHADEKIGIQVRVFDEDPGPFQHVMDQISSCTQKEKLLPEVDTLVERSRHVNTPKHKAVLVTSLNAGYAENLKSMYWEYPTSTGEIIGVHQPSQEGYQQTEKKMHNGKALAEMYLLSLTDNLVTSAWSTFGYVAQGLGGLKPWILYRPENRTTPDPSCGRAMSMEPCFHSPPFYDCKAKTGIDTGTLVPHVRHCEDISWGLKLV

SEQ ID NO: 89 - protein, 402 aa, Bos taurus
MKFREPLLGGSAAMPGASLQRACRLLVAVCALHLGVTLVYYLAGRDLRRLPQLVGVHPPLQGSSHGAAAIGQPSGELRLRGVAPPPPLQNSSKPRSRAPSNLDAYSHPGPGPGPGSNLTSAPVPSTTTRSLTACPEESPLLVGPMLIEFNIPVDLKLVEQQNPKVKLGGRYTPMDCISPHKVAIIIPFRNRQEHLKYWLYYLHPILQRQQLDYGIYVINQAGESMFNRAKLLNVGFKEALKDYDYNCFVFSDVDLIPMNDHNTYRCFSQPRHISVAMDKFGFSLPYVQYFGGVSALSKQQFLSINGFPNNYWGWGGEDDDIYNRLAFRGMSVSRPNAVIGKCRMIRHSRDKKNEPNPQRFDRIAHTKETMLSDGLNSLTYMVLEVQRYPLYTKITVDIGTPS

SEQ ID NO: 90 - protein, 822 aa, Pseudomonas aeruginosa
MRLLKFLWWTCVTLICGVLLSFSGAYLYLSPSLPSVEALRNVQLQIPLKVYSEDGKLISEFGEMRRTPIRFADIPQDFIHALLSAEDDNFANHYGVDVKSLMRAAAQLLKSGHIQTGGSTITMQVAKNYFLTNERSFSRKINEILLALQIERQLTKDEILELYVNKIYLGNRAYGIEAAAQVYYGKPIKDLSLAEMAMIAGLPKAPSRYNPLVNPTRSTERRNWILERMLKLGFIDQQRYQAAVEEPINASYHVQTPELNAPYIAEMARAEMVGRYGSEAYTEGYKVITTVRSDLQNAASQSVRDGLIDYDQRHGYRGPETRLPGQTRDAWLKHLGQQRSIGGLEPAIVTQVEKSGIMVMTRDGKEEAVTWDSMKWARPFLSNNSMGPMPRQPADVAQAGDQIRVQRQEDGTLRFVQIPAAQSALISLDPKDGAIRSLVGGFSFEQSNYNRAIQAKRQPGSSFKPFIYSAALDNGFTAASLVNDAPIVFVDEYLDKVWRPKNDTNTFLGPIPLREALYKSRNMVSIRVLQGLGIERAISYITKFGFQRDELPRNFSLALGTATVTPMEIAGAWSVFANGGYKVNPYVIERIESRDGQVLYQANPPRVPVEEQVAADAEDAGNPGDPEHPESAEGEGSIEAQQVAAKAQTTFEPTPAERIIDARTAYIMTSMLQDVIKRGTGRRALALKRTDLAGKTGTTNDSKDGWFSGYNSDYVTSVWVGFDQPETLGRREYGGTVALPIWIRYMGFALKDKPMHTMAEPPGIVSLRIDPVTGRSAAPGTPGAYFEMFKNEDTPPSVNELPPGSFPGSPLPDDEGAPIDLF

SEQ ID NO: 91 - protein, 1455 aa, Streptococcus mutans serotype c
MEKKVRFKLRKVKKRWVTVSVASAVVTLTSLSGSLVKADSTDDRQQAVTESQASLVTTSEAAKETLTATDTSTATSATSQPTATVTDNVSTTNQSTNTTANTANFDVKPTTTSEQSKTDNSDKIIATSKAVNRLTATGKFVPANNNTAHSRTVTDKIVPIKPKIGKLKQPSSLSQDDIAALGNVKNIRKVNGKYYYYKEDGTLQKNYALNINGKTFFFDETGALSNNTLPSKKGNITNNDNTNSFAQYNQVYSTDAANFEHVDHYLTAESWYRPKYILKDGKTWTQSTEKDFRPLLMTWWPDQETQRQYVNYMNAQLGIHQTYNTATSPLQLNLAAQTIQTKIEEKITAEKNTNWLRQTISAFVKTQSAWNSDSEKPFDDHLQKGALLYSNNSKLTSQANSNYRILNRTPTNQTGKKDPRYTADRTIGGYEFLLANDVDNSNPVVQAEQLNWLHFLMNFGNIYANDPDANFDSIRVDAVDNVDADLLQIAGDYLKAAKGIHKNDKAANDHLSILEAWSYNDTPYLHDDGDNMINMDNRLRLSLLYSLAKPLNQRSGMNPLITNSLVNRTDDNAETAAVPSYSFIRAHDSEVQDLIRNIIRAEINPNVVGYSFTMEEIKKAFEIYNKDLLATEKKYTHYNTALSYALLLTNKSSVPRVYYGDMFTDDGQYMAHKTINYEAIETLLKARIKYVSGGQAMRNQQVGNSEIITSVRYGKGALKATDTGDRTTRTSGVAVIEGNNPSLRLKASDRVVVNMGAAHKNQAYRPLLLTTDNGIKAYHSDQEAAGLVRYTNDRGELIFTAADIKGYANPQVSGYLGVWVPVGAAADQDVRVAASTAPSTDGKSVHQNAALDSRVMFEGFSNFQAFATKKEEYTNVVIAKNVDKFAEWGVTDFEMAPQYVSSTDGSFLDSVIQNGYAFTDRYDLGISKPNKYGTADDLVKAIKALHSKGIKVMADWVPDQMYALPEKEVVTATRVDKYGTPVAGSQIKNTLYVVDGKSSGKDQQAKYGGAFLEELQAKYPELFARKQISTGVPMDPSVKIKQWSAKYFNGTNILGRGAGYVLKDQATNTYFSLVSDNTFLPKSLVNPNHGTSSSVTGLVFDGKGYVYYSTSGNQAKNAFISLGNNWYYFDNNGYMVTGAQSINGANYYFLSNGIQLRNAIYDNGNKVLSYYGNDGRRYENGYYLFGQQWRYFQNGIMAVGLTRIHGAVQYFDASGFQAKGQFITTADGKLRYFDRDSGNQISNRFVRNSKGEWFLFDHNGVAVTGTVTFNGQRLYFKPNGVQAKGEFIRDADGHLRYYDPNSGNEVRNRFVRNSKGEWFLFDHNGIAVTGTRVVNGQRLYFKSNGVQAKGELITERKGRIKYYDPNSGNEVRNRYVRTSSGNWYYFGNDGYALIGWHVVEGRRVYFDENGVYRYASHDQRNHWDYDYRRDFGRGSSSAVRFRHSRNGFFDNFFRF

SEQ ID NO: 92 - protein, 1772 aa, Lactobacillus reuteri
MEIKKHFKLYKSGKQWVTAAVATVAVSTALLYGGVAHADQQVQSSTTQEQTSTVNADTTKTVNLDTNTDQPAQTTDKNQVANDTTTNQSKTDSTSTTVKNPTFIPVSTLSSSDNEKQSQNYNKPDNGNYGNVDAAYFNNNQLHISGWHATNASQGTDSRQVIVRDITTKTELGRTNVTNNVLRPDVKNVHNVYNADNSGFDVNINIDFSKMKDYRDSIEIVSRYSGNGKSVDWWSQPITFDKNNYAYLDTFEVKNGELHATGWNATNKAINYNHHFVILFDRTNGKEVTRQEVRDGQSRPDVAKVYPQVVGANNSGFDVTFNIGDLDYTHQYQILSRYSNADNGEGDYVTYWFAPQSIAPANQSNQGYLDSFDISKNGEVTVTGWNATDLSELQTNHYVILFDQTAGQQVASAKVDLISRPDVAKAYPTVKTAETSGFKVTFKVSNLQPGHQYSVVSRFSADENGNGNDKRHTDYWYSPVTLNQTASNIDTITMTSNGLHITGWMASDNSINEATPYAIILNNGREVTRQKLTLIARPDVAAVYPSLYNSAVSGFDTTIKLTNAQYQALNGQLQVLLRFSKAVDGNPNGTNTVTDQFSKNYATTGGNFDYVKVNGNQIEFSGWHATNQSNDKNSQWIIVLVNGKEVKRQLVNDTKDGAAGFNRNDVYKVNPAIENSIMSGFQGIITLPVTVKDENVQLVHRFSNDAKTGEGNYVDFWSEVMSVKDSFQKGNGPLNQFGLQTINGQQYYIDPTTGQPRKNFLLQNGNDWIYFDKDTGAGTNALKLQFDKGTISADEQYRRGNEAYSYDDKSIENVNGYLTADTWYRPKQILKDGTTWTDSKETDMRPILMVWWPNTVTQAYYLNYMKQYGNLLPASLPSFSTDADSAELNHYSELVQQNIEKRISETGSTDWLRTLMHEFVTKNSMWNKDSENVDYGGLQLQGGFLKYVNSDLTKYANSDWRLMNRTATNIDGKNYGGAEFLLANDIDNSNPVVQAEELNWLYYLMNFGTITGNNPEANFDGIRVDAVDNVDVDLLSIARDYFNAAYNMEQSDASANKHINILEDWGWDDPAYVNKIGNPQLTMDDRLRNAIMDTLSGAPDKNQALNKLITQSLVNRANDNTENAVIPSYNFVRAHDSNAQDQIRQAIQAATGKPYGEFNLDDEKKGMEAYINDQNSTNKKWNLYNMPSAYTILLTNKDSVPRVYYGDLYQDGGQYMEHKTRYFDTITNLLKTRVKYVAGGQTMSVDKNGILTNVRFGKGAMNATDTGTDETRTEGIGVVISNNTNLKLNDGESVVLHMGAAHKNQKYRAVILTTEDGVKNYTNDTDAPVAYTDANGDLHFTNTNLDGQQYTAVRGYANPDVTGYLAVWVPAGAADDQDARTAPSDEAHTTKTAYRSNAALDSNVIYEGFSNFIYWPTTESERTNVRIAQNADLFKSWGITTFELAPQYNSSKDGTFLDSIIDNGYAFTDRYDLGMSTPNKYGSDEDLRNALQALHKAGLQAIADWVPDQIYNLPGKEAVTVTRSDDHGTTWEVSPIKNVVYITNTIGGGEYQKKYGGEFLDTLQKEYPQLFSQVYPVTQTTIDPSVKIKEWSAKYFNGTNILHRGAGYVLRSNDGKYYNLGTSTQQFLPSQLSVQDNEGYGFVKEGNNYHYYDENKQMVKDAFIQDSVGNWYYFDKNGNMVANQSPVEISSNGASGTYLFLNNGTSFRSGLVKTDAGTYYYDGDGRMVRNQTVSDGAMTYVLDENGKLVSESFDSSATEAHPLKPGDLNGQK

SEQ ID NO: 93 - protein, 1781 aa, Lactobacillus reuteri
MEIKKHFKLYKSGKQWVTAAVATVAVSTALLYGGVAHADQQVQQASTTQDQTSTVNNDTDKTVALDTNTDQSAQTTDKKQVVSNTNQSKTDDTSTADKNSTSTPVSVLPSNNTEKQAKNYNEQDKGNYGNIDTAYFSNNQLHVSGWNATNASQGTNSRQIIVRDITTNNELGRTDVTNNVARPDVKNVHNVYNADNSGFDVNVNIDFSKMKDYRDSIEIVSRYSGNGKSVDWWSQPITFDKNNYAYLDTFEVKNGELHATGWNATNSAINYNHHFVILFDQTNGKEVARQEVREGQSRPDVAKVYPQVVGAANSGFNVTFNISDLDYTHQYQVLSRYSNSDNGEGDNVTYWFNPQSIAPANQSNQGYLDSFDISKNGEVTVTGWNATDLSELQNNHYVILFDQTAGKQVASAKADLISRPDVAKAYPTVKTATNSGFKVTFKVNNLQPGHQYSVVSRFSADENGNGNDKRHTDYWFSPVILNQTASNIDTITMTSNGLHIAGWMASDNSINETTPYAIILNNGKEVTRQKMSLTARPDVAAVYPSLYNSAVSGFDTTIKLTNDQYQALNGQLQVLLRFSKAADGNPSGDNTVTDQFSKNYATTGGNFDYVKVNGNQVEFSGWHATNQSNDKDSQWIIVLVNGKEVKRQLVNDTKEGAAGFNRNDVYKVNPAIENSSMSGFQGIITLPVTVKNENVQLVHRFSNDVKTGEGNYVDFWSELMPVKDSFQKGNGPLKQFGLQTINGQQYYIDPTTGQPRKNFLLQSGNNWIYFDSDTGVGTNALELQFAKGTVSSNEQYRNGNAAYSYDDKSIENVNGYLTADTWYRPKQILKDGTTWTDSKETDMRPILMVWWPNTLTQAYYLNYMKQHGNLLPSALPFFNADADPAELNHYSEIVQQNIEKRISETGNTDWLRTLMHDFVTNNPMWNKDSENVNFSGIQFQGGFLKYENSDLTPYANSDYRLLGRMPINIKDQTYRGQEFLLANDIDNSNPVVQAEQLNWLYYLLNFGTITANNDQANFDSVRVDAPDNIDADLMNIAQDYFNAAYGMDSDAVSNKHINILEDWNHADPEYFNKIGNPQLTMDDTIKNSLNHGLSDATNRWGLDAIVHQSLADRENNSTENVVIPNYSFVRAHDNNSQDQIQNAIRDVTGKDYHTFTFEDEQKGIDAYIQDQNSTVKKYNLYNIPASYAILLTNKDTIPRVYYGDLYTDGGQYMEHQTRYYDTLTNLLKSRVKYVAGGQSMQTMSVGGNNNILTSVRYGKGAMTATDTGTDETRTQGIGVVVSNTPNLKLGANDKVVLHMGAAHKNQQYRAAVLTTTDGVINYTSDQGAPVAMTDENGDLYLSSHNLVVNGKEEADTAVQGYANPDVSGYLAVWVPVGASDNQDARTAPSTEKNSGNSAYRTNAAFDSNVIFEAFSNFVYTPTKESERANVRIAQNADFFASLGFTSFEMAPQYNSSKDRTFLDSTIDNGYAFTDRYDLGMSEPNKYGTDEDLRNAIQALHKAGLQVMADWVPDQIYNLPGKEVATVTRVDDRGNVWKDAIINNNLYVVNTIGGGEYQKKYGGAFLDKLQKLYPEIFTKKQVSTGVAIDPSQKITEWSAKYFNGTNILHRGSGYVLKADGGQYYNLGTTTKQFLPIQLTGEKKQGNEGFVKGNDGNYYFYDLAGNMVKNTFIEDSVGNWYFFDQDGKMVENKHFVDVDSYGEKGTYFFLKNGVSFRGGLVQTDNGTYYFDNYGKMVRNQTINAGAMIYTLDENGKLIKASYNSDAEYPTSTDVGKMLDQNKL

SEQ ID NO: 94 - protein, 710 aa, Thermoanaerobacterium thermosulfurigenes
MKKTFKLILVLMLSLTLVFGLTAPIQAASDTAVSNVVNYSTDVIYQIVTDRFVDGNTSNNPTGDLYDPTHTSLKKYFGGDWQGIINKINDGYLTGMGVTAIWISQPVENIYAVLPDSTFGGSTSYHGYWARDFKRTNPYFGSFTDFQNLINTAHAHNIKVIIDFAPNHTSPASETDPTYAENGRLYDNGTLLGGYTNDTNGYFHHYGGTDFSSYEDGIYRNLFDLADLNQQNSTIDSYLKSAIKVWLDMGIDGIRLDAVKHMPFGWQKNFMDSILSYRPVFTFGEWFLGTNEIDVNNTYFANESGMSLLDFRFSQKVRQVFRDNTDTMYGLDSMIQSTASDYNFINDMVTFIDNHDMDRFYNGGSTRPVEQALAFTLTSRGVPAIYYGTEQYMTGNGDPYNRAMMTSFNTSTTAYNVIKKLAPLRKSNPAIAYGTTQQRWINNDVYIYERKFGNNVALVAINRNLSTSYNITGLYTALPAGTYTDVLGGLLNGNSISVASDGSVTPFTLSAGEVAVWQYVSSSNSPLIGHVGPTMTKAGQTITIDGRGFGTTSGQVLFGSTAGTIVSWDDTEVKVKVPSVTPGKYNISLKTSSGATSNTYNNINILTGNQICVRFVVNNASTVYGENVYLTGNVAELGNWDTSKAIGPMFNQVVYQYPTWYYDVSVPAGTTIQFKFIKKNGNTITWEGGSNHTYTVPSSSTGTVIVNWQQ

SEQ ID NO: 95 - protein, 1281 aa, Paenibacillus sp. 598K
MSIPVHQPLLRRMLAILLALALILPIVPPWQEASAAGLGNVTGAVASGDSLTLTLDNGTSASDILELDVLSEELLRVDYRPSGAAPSPSTPMIDPDASWDAVGATIDTSGDPIVVTTPRMRIEIARTPARMTIKKADGTTLLWEPASGGVFEDGVRFQRGSTDNIYGIRSFNAQEDVGGLLRNSSDHPAHAGQQGDAGGPFMWSTAGYGVLVDSDGGYPYTDTTGKLEFYYGGTPTEGRRYTKTNVEYYIMVGEPKEIMASYAQVTGTAPMLPKWSLGFMNFEWGIDQDELEAHVDGYRARNIPIDAFALDYDWMDYGEDNYGEFRWNTDNFPDAATTQLKEDMEAEGIRLIGIRKPRIITRDFANQRTQQYYDADSNGYFYPGHNEYTDYFIPVTVRSFDPYQQASRDWWWQHSIDAFDKGIVGWWNDETDKVDSGSAQYWFGNFSTGFTSQAMYDGQRDYTNDGVRVWQTARSYYPGAQRYATTLWSGDIGTQFYKGELFNWAPGMQEQPRIMLSSANLGQPKWGMDTGGFNSLGGASGPNPSPELYTRWMQFGAFTPVFRVHGNYNQQRQPWLYGATAEEASKAVMHTRYSLLPYMYAYEREASETGLGLIKPLLFDYPNDPQAADYTEAWMFGDWLLVSPVLGEAQHSKQIYLPAGTWIDYHRGQTYSGGQTIHYPVNADTWTDVPLFVKQGAIIPNQQVLDYVDQQSVTTVNVDIFPSASETSFTYYEDDGSSYDYESGSSFEQRLAAQDLSSSVRVEVGAGSGSYTPDVQHYVLKIHGRAGSAVTAGGSALTGYGDLQALQAASGSGWASGRDIYGDVTYVKLPAASGSATVVEVSGSAPSAATHAIYEVEDASRSGATPTTRAGINTNHSGYSGSGFVDKLDVPGAAVTVYANAPVSGDYPVELRYANGSGSAKTLSVYVNAARVQQLSLADTGAWSQWGTQTTTLPLTAGQNIITYKYDSDAGDTGGVNLDYIRVPFAPTQAEYAAESAKLWGGAGTSQDHWFYKGAAFVDNLTGVGAEASFDVYAPSAGTYNLSLRYANGTGSTKTLSAIVNGGAASTVTLTSPGMNWNLWNEHTMTATLTAGRNTISFRRNSGNSGNVNLDRLAVSASAITTLASERNLLDNGDFERDTTYNSNWTQWQPSGQPSAFGIDSGNALHPPEGPARRNQRAYFHSDNAYQQSIHQVVDVPVNNATYRLEAKVRMKNTTPTTARAEVQGHGGSPIYANISNDGVWKTIVIDNINVTSGSVDVGFYVDSPGYTTLHIDEVTLTRAP

SEQ ID NO: 96 - protein, 726 aa, Aquifex aeolicus
MKKLVIGILGIVIALFVGLLVFLIPIYKNLPDPKLLESWTPPQASEVYDAKGRLYGTIGIQKRFYVSIDKIPEHVINAFVATEDRNFWHHFGIDPVAIVRAAIVNYRAGRIVQGGSTITQQLAKNLFLTRERTLERKIKEALLAIKIERTFDKKKIMELYLNQIYLGSGAYGVEAAAQVYFGKHVWELSLDEAALLAALPKAPAKYNPFYHPERALQRRNLVLKRMLEEGYITPEQYEEAVNKPLTVKKENKYKFSDYFLDMVKSYVFNKYGEIAYKGRLKIYTTIDLDYQKIAQKSLEEGLKRVAKIIGLPFLPKSEEDMELAYEKEAQLKRLKRGKIYVAKILKYDGNFMKVEIHGKKLKGEIKGLNTEGHKYVFVKYLGGNRAEIIPDLEGSLVSIDVKTGEIKAIVGGRSYAYSQFNRAVKALRQPGSAIKPVIYLSALLKGMTQISTIDASSKPYYDPSKGEDWIPKNYDEKEYGNVTLRYALAHSINTAAVNLLDKVGFELVLEVGKKVGLDNLKPYYSLALGTVEVTPLQLTAAYQVFANLGTECKPFFIKKIVDENGEVLEENVPECEEVLPKPETRVPVDMLRAVVLEGTARRASVLDRIVAGKTGTTDDFQDAWFVGFSPYIVTGVWVGYDVKKSLGKHMSGSRVALPIWIDYMKVVTRMYPNEDFELPPENIVVNINPKDLVLADETCEGVPMVFVKGTEPHITCSDLNAILGLR

SEQ ID NO: 97 - protein, 713 aa, Unk Bacillus sp.
MKRFMKLTAVWTLWLSLTLGLLSPVHAAPDTSVSNKQNFSTDVIYQIFTDRFSDGNPANNPTGAAFDGSCTNLRLYCGGDWQGIINKINDGYLTGMGITAIWISQPVENIYSVINYSGVNNTAYHGYWARDFKKTNPAYGTMQDFKNLIDTAHAHNIKVIIDFAPNHTSPASSDDPSFAENGRLYDNGNLLGGYTNDTQNLFHHYGGTDFSTIENGIYKNLYDLADLNHNNSSVDVYLKDAIKMWLDLGVDGIRVDAVKHMPFGWQKSFMATINNYKPVFTFGEWFLGVNEISPEYHQFANESGMSLLDFRFAQKARQVFRDNTDNMYGLKAMLEGSEVDYAQVNDQVTFIDNHDMERFHTSNGDRRKLEQALAFTLTSRGVPAIYYGSEQYMSGGNDPDNRARLPSFSTTTTAYQVIQKLAPLRKSNPAIAYGSTHERWINNDVIIYERKFGNNVAVVAINRNMNTPASITGLVTSLRRASYNDVLGGILNGNTLTVGAGGAASNFTLAPGGTAVWQYTTDATTPIIGNVGPMMAKPGVTITIDGRGFGSGKGTVYFGTTAVTGADIVAWEDTQIQVKIPAVPGGIYDIRVANAAGAASNIYDNFEVLTGDQVTVRFVINNATTALGQNVFLTGNVSELGNWDPNNAIGPMYNQVVYQYPTWYYDVSVPAGQTIEFKFLKKQGSTVTWEGGANRTFTTPTSGTATVNVNWQP

SEQ ID NO: 98 - protein, 713 aa, Bacillus circulans
MKKFLKSTAALALGLSLTFGLFSPAQAAPDTSVSNKQNFSTDVIYQIFTDRFSDGNPANNPTGAAFDGTCTNLRLYCGGDWQGIINKINDGYLTGMGVTAIWISQPVENIYSIINYSGVNNTAYHGYWARDFKKTNPAYGTIADFQNLIAAAHAKNIKVIIDFAPNHTSPASSDQPSFAENGRLYDNGTLLGGYTNDTQNLFHHNGGTDFSTTENGIYKNLYDLADLNHNNSTVDVYLKDAIKMWLDLGIDGIRMDAVKHMPFGWQKSFMAAVNNYKPVFTFGEWFLGVNEVSPENHKFANESGMSLLDFRFAQKVRQVFRDNTDNMYGLKAMLEGSAADYAQVDDQVTFIDNHDMERFHASNANRRKLEQALAFTLTSRGVPAIYYGTEQYMSGGTDPDNRARIPSFSTSTTAYQVIQKLAPLRKCNPAIAYGSTQERWINNDVLIYERKFGSNVAVVAVNRNLNAPASISGLVTSLPQGSYNDVLGGLLNGNTLSVGSGGAASNFTLAAGGTAVWQYTAATATPTIGHVGPMMAKPGVTITIDGRGFGSSKGTVYFGTTAVSGADITSWEDTQIKVKIPAVAGGNYNIKVANAAGTASNVYDNFEVLSGDQVSVRFVVNNATTALGQNVYLTGSVSELGNWDPAKAIGPMYNQVVYQYPNWYYDVSVPAGKTIEFKFLKKQGSTVTWEGGSNHTFTAPSSGTATINVNWQP

SEQ ID NO: 99 - protein, 714 aa, Paenibacillus macerans
MKSRYKRLTSLALSLSMALGISLPAWASPDTSVDNKVNFSTDVIYQIVTDRFADGDRTNNPAGDAFSGDRSNLKLYFGGDWQGIIDKINDGYLTGMGVTALWISQPVENITSVIKYSGVNNTSYHGYWARDFKQTNDAFGDFADFQNLIDTAHAHNIKVVIDFAPNHTSPADRDNPGFAENGGMYDNGSLLGAYSNDTAGLFHHNGGTDFSTIEDGIYKNLYDLADINHNNNAMDAYFKSAIDLWLGMGVDGIRFDAVKHMPFGWQKSFVSSIYGGDHPVFTFGEWYLGADQTDGDNIKFANESGMNLLDFEYAQEVREVFRDKTETMKDLYEVLASTESQYDYINNMVTFIDNHDMDRFQVAGSGTRATEQALALTLTSRGVPAIYYGTEQYMTGDGDPNNRAMMTSFNTGTTAYKVIQALAPLRKSNPAIAYGTTTERWVNNDVLIIERKFGSSAALVAINRNSSAAYPISGLLSSLPAGTYSDVLNGLLNGNSITVGSGGAVTNFTLAAGGTAVWQYTAPETSPAIGNVGPTMGQPGNIVTIDGRGFGGTAGTVYFGTTAVTGSGIVSWEDTQIKAVIPKVAAGKTGVSVKTSSGTASNTFKSFNVLTGDQVTVRFLVNQANTNYGTNVYLVGNAAELGSWDPNKAIGPMYNQVIAKYPSWYYDVSVPAGTKLDFKFIKKGGGTVTWEGGGNHTYTTPASGVGTVTVDWQN

SEQ ID NO: 100 - protein, 816 aa, Cellvibrio japonicus
MFRRIAGFSPIFLMLFGSSLPTMGNPVKREIHPDAVFYKEHKLRNDGLVITTNQGNIRLQFKSEAAIEVLYRADSKQLPSFALAQPESAIKAQLTETENHLQFSGGTLTARIQKRPFAISYYRDSELLLAEESGFQVNTDKINFRFYLSPGEKILGGGQRILGMDRRGQRFPLYNRAHYGYSDHSGQMYFGLPAIMSSKQYILVFDNSASGAMDIGKTESDILQLEAKSGRSAYILVAGNSYPSLIENFTQVTGRQPLPPRWALGSFASRFGYRSEAETRATVQKYKTEDFPLDTIVLDLYWFGKDIKGHMGNLDWDKENFPTPLDMMADFKQQGVKTVLITEPFVLTSSKRWDDAVKAKALAKDPQGQPKAFELYFGNGGIIDVFSKEGSRWFSSIYKDLSKQGVAGWWGDLGEPEMHPEDTQHAIGDADTVHNAYGHRWAEMLYQQQLDQFPELRPFIMMRAGFVGSQRYGMIPWTGDVSRTWGGLASQVELALQMSLLGFGYIHSDLGGFADGETLDKEMYIRWLQYGVFQPVYRPHGQDHIPSEPVFQDEETKAILRPLVKLRYRMLPYIYTAAYQNTLTGMPLMRPLFFSDEKNPALIDNKTSYFWGDSLLVTPITQAGVESVSIPAPKGVWFDFWKDTRYQTDGAPLTLPTDLHTIPVLVKAGAFMPYVPAVSTTEDYRSDSLEIHYYADASVPLAQGEIFEDDGKDPNSIKRNQFDLLTLQATHTDNQLHFQLARTGKGYRGMPERRATTLVIHNASDQYQHLDINGKTIAIAQADCASTPALACYDQERRQLQLVFTWGREALNLRLH

SEQ ID NO: 101 - protein, 702 aa, Bacillus clarkii
MFRKLLCTLVTIITLSAWIVSHGGEVHASNATNDLSNVNYAEEVIYHIVTDRFKDGDPDNNPQGQLFSNGCSDLTKYCGGDWQGIIDEIESGYLPDMGITALWISPPVENVFDLHPEGFSSYHGYWARDFKKTNPFFGDFDDFSRLIETAHAHDIKVVIDFVPNHTSPVDIEDGALYDNGTLLGHYSTDANNYFYNYGGSDFSDYENSIYRNLYDLASLNQQHSFIDKYLKESIQLWLDTGIDGIRVDAVAHMPLGWQKAFISSVYDYNPVFTFGEWFTGAQGSNHYHHFVNNSGMSALDFRYAQVAQDVLRNQKGTMHDIYDMLASTQLDYERPQDQVTFIDNHDIDRFTVEGRDTRTTDIGLAFLLTSRGVPAIYYGTENYMTGKGDPGNRKMMESFDQTTTAYQVIQKLAPLRQENKAVAYGSTKERWINDDVLIYERSFNGDYLLVAINKNVNQAYTISGLLTEMPAQVYHDVLDSLLDGQSLAVKENGTVDSFLLGPGEVSVWQHISESGSAPVIGQVGPPMGKPGDAVKISGSGFGSEPGTVYFRDTKIDVLTWDDETIVITLPETLGGKAQISVTNSDGVTSNGYDFQLLTGKQESVRFVVDNAHTNYGENVYLVGNVPELGNWNPADAIGPMFNQVVYSYPTWYYDVSVPADTALEFKFIIVDGNGNVTWESGGNHNYRVTSGSTDTVRVSFRR

SEQ ID NO: 102 - protein, 718 aa, Bacillus circulans
MFQMAKRAFLSTTLTLGLLAGSALPFLPASAVYADPDTAVTNKQSFSTDVIYQVFTDRFLDGNPSNNPTGAAYDATCSNLKLYCGGDWQGLINKINDNYFSDLGVTALWISQPVENIFATINYSGVTNTAYHGYWARDFKKTNPYFGTMADFQNLITTAHAKGIKIVIDFAPNHTSPAMETDTSFAENGRLYDNGTLVGGYTNDTNGYFHHNGGSDFSSLENGIYKNLYDLADFNHNNATIDKYFKDAIKLWLDMGVDGIRVDAVKHMPLGWQKSWMSSIYAHKPVFTFGEWFLGSAASDADNTDFANKSGMSLLDFRFNSAVRNVFRDNTSNMYALDSMINSTATDYNQVNDQVTFIDNHDMDRFKTSAVNNRRLEQALAFTLTSRGVPAIYYGTEQYLTGNGDPDNRAKMPSFSKSTTAFNVISKLAPLRKSNPAIAYGSTQQRWINNDVYVYERKFGKSVAVVAVNRNLSTSASITGLSTSLPTGSYTDVLGGVLNGNNITSTNGSINNFTLAAGATAVWQYTTAETTPTIGHVGPVMGKPGNVVTIDGRGFGSTKGTVYFGTTAVTGAAITSWEDTQIKVTIPSVAAGNYAVKVAASGVNSNAYNNFTILTGDQVTVRFVVNNASTTLGQNLYLTGNVAELGNWSTGSTAIGPAFNQVIHQYPTWYYDVSVPAGKQLEFKFFKKNGSTITWESGSNHTFTTPASGTATVTVNWQ

SEQ ID NO: 103 - protein, 603 aa, Homo sapiens
MRRKEKRLLQAVALVLAALVLLPNVGLWALYRERQPDGTPGGSGAAVAPAAGQGSHSRQKKTFFLGDGQKLKDWHDKEAIRRDAQRVGNGEQGRPYPMTDAERVDQAYRENGFNIYVSDKISLNRSLPDIRHPNCNSKRYLETLPNTSIIIPFHNEGWSSLLRTVHSVLNRSPPELVAEIVLVDDFSDREHLKKPLEDYMALFPSVRILRTKKREGLIRTRMLGASVATGDVITFLDSHCEANVNWLPPLLDRIARNRKTIVCPMIDVIDHDDFRYETQAGDAMRGAFDWEMYYKRIPIPPELQKADPSDPFESPVMAGGLFAVDRKWFWELGGYDPGLEIWGGEQYEISFKVWMCGGRMEDIPCSRVGHIYRKYVPYKVPAGVSLARNLKRVAEVWMDEYAEYIYQRRPEYRHLSAGDVAVQKKLRSSLNCKSFKWFMTKIAWDLPKFYPPVEPPAAAWGEIRNVGTGLCADTKHGALGSPLRLEGCVRGRGEAAWNNMQVFTFTWREDIRPGDPQHTKKFCFDAISHTSPVTLYDCHSMKGNQLWKYRKDKTLYHPVSGSCMDCSESDHRIFMNTCNPSSLTQQWLFEHTNSTVLEKFNRN

SEQ ID NO: 104 - protein, 269 aa, Staphylococcus aureus
MKRSDRYSNSNEHFEHMKHEPHYNTYYQPVGKPPKKKKSKRILLKILLTILIIIALFIGIMYFLSTRDNVDELRKIENKSSFVSADNMPEYVKGAFISMEDERFYNHHGFDLKGTTRALFSTISDRDVQGGSTITQQVVKNYFYDNDRSFTRKVKELFVAHRVEKQYNKNEILSFYLNNIYFGDNQYTLEGAANHYFGTTVNKNSTTMSHITVLQSAILASKVNAPSVYNINNMSENFTQRVSTNLEKMKQQNYINETQYQQAMSQLNR

SEQ ID NO: 105 - protein, 2835 aa, Leuconostoc mesenteroides
MRDMRVICDRKKLYKSGKVLVTAGIFALMMFGVTTASVSANTIAVDTNHSRTSAQINKSAVDKVNDDKTTLGAAKVVAVATTPATPVADKTVSAPAADKAVDTTSSTTPATDKAVDTTPTTPAADKAVDTTPTTPAADKAVDTTPTTPAANKAVDTTPATAATDKAVATPATPAADKLANTTPATDKAVATTPATPVANKAADTSSIHDQPLDTNVPTDKSANLVSTTQKSTDNQQVKSTETSHLQEINGKTYFLDDNGQVKKNFTAIIDGKVLYFDKTSGELTANAPQVTKGLVNIDNAHNAAHDLTADNFTNVDGYLTANSWYRPKDILKNGTTWTPTTAEDFRPLLMSWWPDKNTQVAYLQYMQSVGMLPDDVKVSNDDNMSTLTDAAMTVQKNIESRIGVSGKTDWLKQDMNKLIDSQANWNIDSESKGNDHLQGGALLYVNDDKTPNANSDYRLLNRTPTNQTGQITDPSKQGGYEMLLANDVDNSNPVVQAEQLNWLHYMMNIGTIAQNDPTANFDGYRVDAVDNVDADLLQIAGDYFKAAYGTGKTEANANNHISILEDWDNNDSAYIKAHGNNQLTMDFPAHLALKYALNMPLAAQSGLEPLINTSLVKRGKDATENEAQPNYAFIRAHDSEVQTVIAQIIKDKINTKSDGLTVTPDEIKQAFTIYNADELKADKEYTAYNIPASYAVLLTNKDTVPRVYYGDLFSDDGQYMSQKSPYYDAITSLLKSRIKYVAGGQSMNMTYLHECFDPAKNETKPQGVLTSVRYGKGAMTADDLGNSDTRQQGIGLVINNKPFLNLNDDEQIVLNMGAAHKNQAYRPLMLTTKSGLQIYDKDAGAPVVYTNDAGQLIFKSDMVYGVSNPQVSGYFAAWVPVGASDSQDARTQSSQSETKDGDVYHSNAALDSNVIYEGFSNFQAMPEKNDDFTNVKIAQNAKLFKDLGITSFELAPQYRSSTDNSFLDSVIQNGYAFTDRYDVGYNTPTKYGTVDQLLDSLRALHAQGIQAINDWVPDQIYNLPGEQIVTAVRTNGSGKYDYDSVINNTLYDSRTVGGGEYQEKFGGLFLDQLKKDYPSLFETKQISTNQPMNPDVKIKEWSAKYFNGSNIQGRGAWYVLKDWATNQYFNVSSDNGFLPKQLLGEKTSTGFITENGKTSFYSTSGYQAKDTFIQDGTNWYYFDNAGYMLTGKQNIHDKNYYFLPNGVELQDAYLFDGNQEFYYNKAGEQVMNQYYQDSQNQWHYFFENGRMAIGLTEVPNADGTHVTQYFDANGVQIKGTAIKDQNNQLRYFDEATGNMVVNSWGQLADKSWLYLNAQGVAVTGNQKIDGEEYYFNADGKQVKGNAIIDNNGDQRYYDGDKGVMVVNSWGELPDGSWLYLNDKGIAVTGRQVINNQVNFFGNDGKQIKDAFKLLSDGSWVYLDDKGLITTGAKVINGLNMFFDKDGHQIKGDASTDANGKRHYYDKNDGHLVTNSWGELPDGSWLYLEEQGDAVTGQRVIDGKTRYFDEDGKQIKNSLKTLANGDKIYLDGDGVAATGLQHVGDKIMYFDEDGKQVVGKFVSAKDGSWYYLNQDGVAAVGPSSINGQSLYFDQDGKQVKYNEVRNSDGTTNYYTGLTGEKLTQDFGELPDGSWIYLDAQGHTVTGAQIINGQNLYFKADGQQVKGHAYTDQLGHMRFYDPDSGDMLSNRFEQITPGVWAYFGADGVAITGQHDINGQKLFFDETGYQVKGSQRTIDGTLYSFDSQTGNQKRVQTTLLPQAGHYITKNGNDWQYDTNGELAKGLRQDSNGKLRYFDLTTGIQAKGQFVTIGQETYYFSKDHGDAQLLPMVTEGHYGTITLKQGQDTKTAWVYRDQNNTILKGLQNINGTLQFFDPYTGEQLKGGVAKYDDKLFYFESGKGNLVSTVAGDYQDGHYISQDGQTRYADKQNQLVKGLVTVNGALQYFDNATGNQIKNQQVIVDGKTYYFDDKGNGEYLFTNTLDMSTNAFSTKNVAFNHDSSSFDHTVDGFLTADTWYRPKSILANGTTWRDSTDKDMRPLITVWWPNKNVQVNYLNFMKANGLLTTAAQYTLHSDQYDLNQAAQDVQVAIERRIASEHGTDWLQKLLFESQNNNPSFVKQQFIWNKDSEYHGGGDAWFQGGYLKYGNNPLTPTTNSDYRQPGNAFDFLLANDVDNSNPVVQAENLNWLHYLMNFGTITAGQDDANFDSIRIDAVDFIHNDTIQRTYDYLRDAYQVQQSEAKANQHISLVEAGLDAGTSTIHNDALIESNLREAATLSLTNEPGKNKPLTNMLQDVDGGTLITDHTQNSTENQATPNYSIIHAHDKGVQEKVGAAITDATGADWTNFTDEQLKAGLELFYKDQRATNKKYNSYNIPSIYALMLTNKDTVPRMYYGDMYQDDGQYMANKSIYYDALVSLMTARKSYVSGGQTMSVDNHGLLKSVRFGKDAMTANDLGTSATRTEGLGVIIGNDPKLQLNDSDKVTLDMGAAHKNQKYRAVILTTRDGLATFNSDQAPTAWTNDQGTLTFSNQEINGQDNTQIRGVANPQVSGYLAVWVPVGASDNQDARTAATTTENHDGKVLHSNAALDSNLIYEGFSNFQPKATTHDELTNVVIAKNADVFNNWGITSFEMAPQYRSSGDHTFLDSTIDNGYAFTDRYDLGFNTPTKYGTDGDLRATIQALHHANMQVMADVVDNQVYNLPGKEVVSATRAGVYGNDDATGFGTQLYVTNSVGGGQYQEKYAGQYLEALKAKYPDLFEGKAYDYWYKNYANDGSNPYYTLSHGDRESIPADVAIKQWSAKYMNGTNVLGNGMGYVLKDWHNGQYFKLDGDKSTLPQI

SEQ ID NO: 106 - protein, 438 aa, Candida albicans
MQLSFILTSSVFILLLEFVKASVISNPFKPNGNLKFKRGGGHNVAWDYDNNVIRGVNLGGWFVLEPYMTPSLFEPFQNGNDQSGVPVDEYHWTQTLGKEAASRILQKHWSTWITEQDFKQISNLGLNFVRIPIGYWAFQLLDNDPYVQGQVQYLEKALGWARKNNIRVWIDLHGAPGSQNGFDNSGLRDSYNFQNGDNTQVTLNVLNTIFKKYGGNEYSDVVIGIELLNEPLGPVLNMDKLKQFFLDGYNSLRQTGSVTPVIIHDAFQVFGYWNNFLTVAEGQWNVVVDHHHYQVFSGGELSRNINDHISVACNWGWDAKKESHWNVAGEWSAALTDCAKWLNGVNRGARYEGAYDNAPYIGSCQPMLDISQWSDEHKTDTRRYIEAQLDAFEYTGGWVFWSWKTENAPEWSFQTLTYNGLFPQPVTDRQFPNQCGFH

SEQ ID NO: 107 - protein, 972 aa, Paenibacillus sp. 598K
MRKQVTVMAIRNKGWLLLVLALLLALPPWQPAALEQTAHAASGDVERVYTDKSRYDPGDPVTITAQVRNTDSIAWTGTVQLRIAHLEDQVHTASQTVTIGGGQTEDVQFTWTSPATDFKGYLADIDAGALGSGTTAIDVSSDFARYPRYGYVSEFHPDETAAESAAKIDELAQDYKINAWQFYDWMWRHETMIKRTGSAIDSTWIDLFNREISWQTIQNQIDAVHDQNGAAMAYAMIYAAREDYESYGVDSEWGIYQDPNHLQQLDVDFGNNSTYMYLFNPANTDWQSFIHAQYLDAINTAGFDGIHVDQMGQRNNVYDYWGNPLNFPATFTPFINEAKSTLTANNSDKDRITYNIVDGTVDGWAANEVSGGADVDFLYSEIWHLSDSYIQLKDYIDSLKANSGNKAVVLAAYMNYRENIGDRYEAESAALTNTATNNNHSGYTGSGFVDQFADPGDAVTFSITVPEEGYYSLVFRFANNSGFTATRNLYVDSAFEIELPFQNQPSWSAWSHETWHQVYLTPGTHTIKLAYDAGNVGAINLDSLTLGTFDPHSIRLANAMMAASGATHIELGEDSQMLAHEYYPNRSKSMRSELKEALKQHYNFITAYENLLFDPDVVDNDSGSQFVNLDMVSASGDASPNTVWHQVKRTPEYNIVHFINLANNDNQWRNSANPPTLHTNIATKVYVSPDETISGVYLASPDHDDNRTQSLAYTTGTDIHGDYVAFTLPSLEYWSMVYMKRAFDGPTDDIYEAELAIKSATAANNNHSGYTGSGFVDQFSSLNDGVSFIVPSDGEDYALRFRYSNGGTAASKRVFVDGHYAGTVHFPSTGGWDQWRYAELSVSLPPGYRSIVLWHGDASYGAINLDHMQLAKTYIWQFDRQIASVPEGYRITFRAGLPGWVHWGANGWTGVTDTALAPNGSSTGDLDYEISVGPFATGDTVDFTFLWDDNNNGILEPSVDRWEGTDFEIGID

SEQ ID NO: 108 - protein, 398 aa, Homo sapiens
MRLREPLLSGSAAMPGASLQRACRLLVAVCALHLGVTLVYYLAGRDLSRLPQLVGVSTPLQGGSNSAAAIGQSSGELRTGGARPPPPLGASSQPRPGGDSSPVVDSGPGPASNLTSVPVPHTTALSLPACPEESPLLVGPMLIEFNMPVDLELVAKQNPNVKMGGRYAPRDCVSPHKVAIIIPFRNRQEHLKYWLYYLHPVLQRQQLDYGIYVINQAGDTIFNRAKLLNVGFQEALKDYDYTCFVFSDVDLIPMNDHNAYRCFSQPRHISVAMDKFGFSLPYVQYFGGVSALSKQQFLTINGFPNNYWGWGGEDDDIFNRLVFRGMSISRPNAVVGRCRMIRHSRDKKNEPNPQRFDRIAHTKETMLSDGLNSLTYQVLDVQRYPLYTQITVDIGTPS

SEQ ID NO: 109 - protein, 446 aa, Clitoria ternatea
MKNKQHVAIFPFPFGSHLPPLLNLVLKLAHIAPNTSFSFIGTHSSNAFLFTKRHIPNNIRVFTISDGIPEGHVPANNPIEKLDLFLSTGPDNLRKGIELAVAETKQSVTCIIADAFVTSSLLVAQTLNVPWIAFWPNVSCSLSLYFNIDLIRDKCSKDAKNATLDFLPGLSKLRVEDVPQDMLDVGEKETLFSRTLNSLGVVLPQAKAVVVNFFAELDPPLFVKYMRSKLQSLLYVVPLPCPQLLLPEIDSNGCLSWLDSKSSRSVAYVCFGTVVSPPPQEVVAVAEALEESGFPFVWALKESLLSILPKGFVERTSTRGKVVSWVPQSHVLSHGSVGVFVTHCGANSVMESVSNGVPMICRPFFGDQGIAARVIQDIWEVGVIVEGKVFTKNGFVKSLNLILVQEDGKKIRDNALKVKQIVQDAVGPHGQAAEDFNTLVEVISSS

SEQ ID NO: 110 - protein, 504 aa, Bifidobacterium adolescentis [sequence omitted]

SEQ ID NO: 111 - protein, 702 aa, Oryza sativa subsp. japonica
MVTVVEEVDHLPIYDLDPKLEEFKDHFNYRIKRYLDQKCLIEKHEGGLEEFSKGYLKFGINTVDGATIYREWAPAAQEAQLIGEFNNWNGAKHKMEKDKFGIWSIKISHVNGKPAIPHNSKVKFRFRHGGGAWVDRIPAWIRYATFDASKFGAPYDGVHWDPPACERYVFKHPRPPKPDAPRIYEAHVGMSGEEPEVSTYREFADNVLPRIRANNYNTVQLMAIMEHSYYASFGYHVTNFFAVSSRSGTPEDLKYLVDKAHSLGLRVLMDVVHSHASNNVTDGLNGYDVGQNTHESYFHTGDRGYHKLWDSRLFNYANWEVLRFLLSNLRYWMDEFMFDGFRFDGVTSMLYHHHGINKGFTGNYKEYFSLDTDVDAIVYMMLANHLMHKLLPEATIVAEDVSGMPVLCRPVDEGGVGFDFRLAMAIPDRWIDYLKNKEDRKWSMSEIVQTLTNRRYTEKCIAYAESHDQSIVGDKTIAFLLMDKEMYTGMSDLQPASPTINRGIALQKMIHFITMALGGDGYLNFMGNEFGHPEWIDFPREGNNWSYDKCRRQWSLVDTDHLRYKYMNAFDQAMNALEEEFSFLSSSKQIVSDMNEKDKVIVFERGDLVFVFNFHPNKTYKGYKVGCDLPGKYRVALDSDALVFGGHGRVGHDVDHFTSPEGMPGVPETNFNNRPNSFKVLSPPRTCVAYYRVDEDREELRR

SEQ ID NO: 112 - protein, 430 aa, Streptomyces antibioticus
MTTQTTPAHIAMFSIAAHGHVNPSLEVIRELVARGHRVTYAIPPVFADKVAATGPRPVLYHSTLPGPDADPEAWGSTLLDNRRTFLNDAIQALPQLADAYADDIPDLVLHDITSYPARVLARRWGVPAVSLSPNLVAWKGYEEEVAEPMWREPRQTERGRAYYARFEAWLKENGITEHPDTFASHPPRSLVLIPKALQPHADRVDEDVYTFVGACQGDRAEEGGWQRPAGAEKVVLVSLGSAFTKQPAFYRECVRAFGNLPGWHLVLQIGRKVTPAELGELPDNVEVHDWVPQLAILRQADLFVTHAGAGGSQEGLATATPMIAVPQAVDQFGNADMLQGLGVARKLATEEATADLLRETALALVDDPEVARRLRRIQAEMAQEGGTRRAADLIEAELPARHERQEPVGDRPNVGDRPAGVRSDRQRSAL

SEQ ID NO: 113 - protein, 253 aa, Drosophila melanogaster
MGASVHKMALLVPFRDRFEELLQFVPHMTAFLKRQGVAHHIFVLNQVDRFRFNRASLINVGFQFASDVYDYIAMHDVDLLPLNDNLLYEYPSSLGPLHIAGPKLHPKYHYDNFVGGILLVRREHFKQMNGMSNQYWGWGLEDDEFFVRIRDAGLQVTRPQNIKTGTNDTFSHIHNRYHRKRDTQKCFNQKEMTRKRDHKTGLDNVKYKILKVHEMLIDQVPVTILNILLDCDVNKTPWCDCSGTAAAASAVQT

SEQ ID NO: 114 - protein, 751 aa, Bifidobacterium longum
MTSTGRFTLPSEENFAEKTKELAELWGADAIRNSDGTHLDEAVLALGKKIYNAYFPTRAHNEWITLHMDETPQVYLLTDRILAESDTVDIPLMESFFAEQLKPNRDADPHKYWEVVDRTTGEVVDSANWTLDADEDTVHVSGVAAWHEYTVSFLAYIIWDPVEMYNHLTNDWGDKEHEIPFDIYHPATRKFVFDTFEQWLKDSPQTDVVRFTTFFYQFTLLFDEKRREKVVDWFGCACTVSPRALDDFEAKYGYRLRPEDFVDGGAYNSAWRVPRKAQRDWIDFLSGFVRENVKQLADMSHAAGKEAMMFLGDQWIGTEPYKDGFDELGLDAVVGSIGDGTTTRMIADIPGVKYTEGRFLPYFFPDTFYEGNDPSIEGLDNWRKARRAILRSPISRMGYGGYLSLAAKFPKFVDTVTHIANEFRDIHDRTGGVAAEGELNVAILNSWGKMRSWMAFTVAHALPNKQTYSYYGILESLSGMRVNVRFISFDDVLAHGIDSDIDVIINGGPVDTAFTGGDVWTNPKLVETVRAWVRGGGAFVGVGEPSSAPRFQTGRFFQLADVIGVDEERYQTLSVDKYFPPVVPDHFITADVPVDPAAREAWEQAGYRIPLSGCGGGQSIKPLGGIDFGEPVLNTYPVNENVTLLRADGGQVQLATNDYGKGRGVYISGLPYSAANARLLERVLFYASHNEDKYAAWSSSNPECEVAHFPEQGLYCVINNTDQPQKTTVTLADGTTEDFDLPDSGIAWREA

SEQ ID NO: 115 - protein, 457 aa, Bacillus megaterium
MAKGNDSKDFNNSYGISHITRDNMVKIPQQQNSDQFKVPAFDESTIKNIASAKGKNASGNTIDLDVWDSWPLQNADGTVATYHGYQIVFALAGDPKDSNDTSVYLFYKKAGDKSIDSWKNAGRVFKDSDKFVPNDPHLKNQTQEWSGSGTLTKDGKVRLFYTDYSGKQYGKQTLTTAQVNMSQPNDNTLKVDGVEDYKSIFDGDGKIYQTVQQFIDEGGYDTGDNHTLRDPHYIEDNGHKYLVFEANTGTEDGYQGEDSLYNRAYYGGNNPFFQSEKKKLLEGSNKEKASLANGALGIIELNDDYTLKKVMKPLITSNTVTDEIERANIFKKDGKWYLFTDSRGSKMTIDGIGQDDVYMLGYVSNTLTGKYKPLNDTGLVLHMDLDPNDKTFTYSHFAVPQTKGDNVVITSYMTNRGFYEDNHSTFAPSFLVNIDGSKTSVVKDRVLEQGQLTVDED

SEQ ID NO: 116 - protein, 756 aa, Caldicellulosiruptor saccharolyticus
MKLSEREWLIEQDKLEASGKFETCFALTNGYIGIRGINEEVFCEETPGTYIAGVFDKSTAQVTELVNLPNPIGLRIYINREFLNPLKCEILEFKRVLDLKQGILYRKLRLKDVKGRITTIEGFRFVSMNNKNLIVQKYDVVCENYSAVLNVESFIDATTVNSKDVPNDRVKHYEIDKKKDFADGIYLGITTKDKKYKVGIASSTKVLLNNQRCYFNRFTKDLGYIITENFEVEAKQGERYEIEKLTVLVSSREKNVGDVFETCTNKLKEFETKSAEKLLFEHIEEYKRLWDVANIDIVGDEVANKSVKFNIFHLISMANPEDEHVSLGAKGLHGEGYKGHVFWDTEIFMLPFYIYTNPAAAKAMLMYRYNLLDAARENARKNGYKGAQFPWESADTGEEETPKWGYDYLGNPVRIWTGDIEYHISADIAYAVMNYVRATDDIDFLLNYGSEIIIETARFWASICKYNKEKGRYEINDVIGPDEFHEHCNNNAYTNYLAKWNLLKASELCNLLLEKYPKYFEKLSKKINLSDEEPFVWQEIASKIYIPYHPDKKLIEQFEGYFNLKDFVIKEYDQNNMPVWPEGVELDKLNNYQLIKQADVVMLLYLLGEEFDDQTKKINYDYYEKRTMHKSSLSPSIYALMGVRVGETNRAYINFMRTALTDLEDNQGNTHLGIHAASLGGTWQALVFGFGGISIEKDDVLSVNPWLPEKWESLKFSIWWKGNLLDFKITKDNVEVKKRVEKGNVKLKIKGQEAII

SEQ ID NO: 117 - protein, 754 aa, Lactobacillus brevis
MKRIFEVQPWNVITHTFDPKDKRLQESMTSLGNGYMGMRGDFEEGYSGDSLQGIYLGGVWYPDKTRVGWWKNGYPKYFGKVVNAVNFIKLPIEINGEPVDLAKDKISDFTLDLDMHQGVLNRSFVVERGAVRVALNFQRFLSVAQPELSVQKVTVKNLSDAEVDVTLKPSIDADVMNEEANYDERFWDVLATDQQADRGSIVAKTTPNPFGTPRFTSGMEMRLVTDLKNVAITQPNEKEVTTAYTGKLAPQASAELEKRVIVVTSRDYDTQESLTAAMHQLSDKVAQSSYEDLLNAHTAIWAQRWEKSDVVIKGDDESQQGIRFNLFQLFSTYYGEDARLNIGPKGFTGEKYGGATYWDTEAFAFPVYLGITDPKVTRNLLMYRYKQLDGAYINAQEQGLKGALFPMVTFDGIECHNEWEITFEEIHRNGDIAFAIYNYTRYTGDDSYVLHEGAKVLTEISRFWADRVHFSKRNNQYMIHGVTGADEYENNVDNNWDTNMLAQWTLKYTLEILGKVDQDTAKQLDVSDEEKTKWQDIVDRMYLPYDKDLNIFVQHDGFLDKDIEPVSSIPADQRPINQNWSWDKILRSPYIKQGDVLQGIWDFIDDYTPEQKKANFDFYEPLTVHESSLSPAIHSVLAADLHYEDKAVELYSRTARLDLDNYNNDTTDGLHITSMTGAWIAVVQGFAGMRVRDGQLHYAPFLPKTWTSYTFRQVFRDRLIEVSVHADGPHFKLLSGEPLTIDVAGAAAAAAAAA

SEQ ID NO: 118 - protein, 999 aa, Arabidopsis thaliana
MCKMRQQRGFDSSKRQEVKKGSPKPILSINSGLQSNNDEESDLENGSADSVPSLKSDAEKGSSIHGSIDMNHADENLEKKDDIQTTEVTRRKSKTAKKKGESIHATIDIGHDDGKNLDNITVPEVAKALSLNKSEGEQISDGQFGELMTMIRSAEKNILRLDEARATALDDLNKILSDKEALQGEINVLEMKLSETDERIKTAAQEKAHVELLEEQLEKLRHEMISPIESDGYVLALSKELETLKLENLSLRNDIEMLKSELDSVKDTGERVVVLEKECSGLESSVKDLESKLSVSQEDVSQLSTLKIECTDLWAKVETLQLLLDRATKQAEQAVIVLQQNQDLRNKVDKIEESLKEANVYKESSEKIQQYNELMQHKVTLLEERLEKSDAEIFSYVQLYQESIKEFQETLESLKEESKKKSRDEPVDDMPWDYWSRLLLTVDGWLLEKKIASNDADLLRDMVWKKDRRIHDTYIDVKDKNERDAISAFLKLVSSPTSSGLYVVHIAAEMAPVAKVGGLGDVVAGLGKALQRKGHLVEIILPKYDCMQYDRVRDLRALDTVVESYFDGKLYKNKIWIGTVEGLPVHFIEPQHPSKFFWRGQFYGEQDDFRRFSYFSRAALELLLQSGKKPDIIHCHDWQTAFVAPLYWDLYAPKGLDSARICFTCHNFEYQGTASASELGSCGLDVNQLNRPDRMQDHSSGDRVNPVKGAIIFSNIVTTVSPTYAQEVRTAEGGKGLHSTLNFHSKKFIGILNGIDTDSWNPATDPFLKAQFNAKDLQGKEENKHALRKQLGLSSAESRRPLVGCITRLVPQKGVHLIRHAIYRTLELGGQFVLLGSSPVPHIQREFEGIEQQFKSHDHVRLLLKYDEALSHTIYAASDLFIIPSIFEPCGLTQMIAMRYGSIPIARKTGGLNDSVFDIDDDTIPTQFQNGFTFQTADEQGFNYALERAFNHYKKDEEKWMRLVEKVMSIDFSWGSSATQYEELYTRSVSRARAVPNRT

SEQ ID NO: 119 - protein, 644 aa, Deinococcus radiodurans
MLTPDLAARLRLAFDDDRDAETFRLRLERYGPELADNLRAVYGNHADALIGELLEVMLHAYHARPADLKRLDEARLLRPDWLQGPEMVGYVAYVDRFAGTLRGVGERLEYLEGLGVTYLHLLPLLRPRDGENDGGYAVQDYRSVRPDLGTIDDLSALARELRGRGISLVLDLVLNHVAEEHEWAVRATAGEAAYRDYFHIFPDRTQPDAYERTLPEIFPDFAPGNFTWNGEAGGWVWTTFNRSQWDVNWGNPAVFREYLDLILTLANRGVEVFRLDAIAFLWKRLGTDCQNQPEVHRLTHALRAATRIVAPAVAFKAEAIVAPGDLIHYLGSRDHHGRVSDMAYHNSLMVQLWSSLASRDTRLLTAALAAFPPKPTNTTWGVYVRCHDDIGWAIADEDAARVGLSGPAHRHFLSDFYSGEFPGSFARGLVFQHHPQTGDRRISGTAASLAGLDLALETGDAERVNDALARLLLLHAVMLGFGGVPLLYMGDELALLNDTDFAAVPAHAADNRWVHRPQMDWELVASAQADAATGQPVTPAGRMFAGLRHLLAVRRRTPHLHASTESRPLPSPDPCVLLLRREHPTGVLLQVYNFSEHHITFPTWPLQEQLGAVAHDLLGESQFHLGGPDLALEPYRALWLVAGG

SEQ ID NO: 120 - protein, 773 aa, Crocosphaera subtropica
MTTTISADQVNQIIYNLHHDPFEILGCHLLEEGKNTKKWVVRAYLPKAEAAWVIRPTERKEDPMNSVHHPNFFECIIETPELNHYQLKVKEGEHEKVIYDPYAFSSPYLTDEDIYLFSEGNHHRIYEKLGAHVGEINGVKGVYFAVWAPNARNVSVIGDFNNWDGREHQMRKRNYTIWELFVPEIGSGTVYKYEIKNSEGHIYEKSDPYGFYREVRPNTASIVVDIDNIYQWHDEEWLEKRRNSDPLKQPVSVYEVHLGSWLHGSSAEKMPLLNGEADPVIVSEWNPGARFLSYYELAEKLIPYVKDMGYTHIELLPIAEHPFDGSWGYQVTGFYSPTSRFGRPEDFMYFVDKCHENGIGVILDWVPGHFPKDSHGLAYFDGTHLYEHADPRIGEHKEWGTLVFNYGRHEVRNFLVANVLFWFDKYHVDGIRVDAVASMLYRNYLRKEGEWIANEYGGDEHIEAVSFIREVNTLLFEYFPGILSIAEESTEWEKVSRPVYDGGLGFNLKWDMGWMHDMLDYFNIDPYFRQYHQNNVTFSMLYYYNENFMLALSHDEIVHGKSNMLGKMPGDEWQKYANVRALFTYMYTHPGKKTMFMSMEFGQWSEWNVWGDLEWHLLQYEPHQQLKQFFTDLNALYQQEPALYTHDFEYHGFEWIDCNDNTHSVVSFLRRSDDPNDSLVVVCNFTPQPHSHYRIGVPEAGYYVELFNSDAKQYGGSNMGNLGGKWADEWSFHNKPYSLDLCLPPLAVLILKLDPTKVPEGTTIKEIAADEEE

SEQ ID NO: 121 - protein, 450 aa, Streptococcus gordonii
MIQLFDYYNQETQDLHDSLLAAGYACPTIVIEANGFLPDDMISPYTYFLGDEEGVDHPLFFNQVPVPPFWEITGDHQVARVSDMGEERARIHYASQARGRLVKQVDWLDKKGQLRLSERYNKQGRCFAKTAYKSGQEAFNTTYYSTDGQERIVENHVTGDIILTLDQEPLRIFKSRVDFIRFFLERLDLDLDHILFNSLAYSFLVSHSLTGRAGQDILFWQEPLYDELPGNMQLILDNSQLRTQTIVIPDLATYEKAMSLAAADQQQKFLHLGYHYDFKRDNYLRKDALILTHSDQIEGLDTLVQSLPQLVFRIAALTEMSPKLLSMLSYKNVVLYQNASLKQIEQLYLESDIYLDINHGGQVLQAVRKAFENNLLILGFEQTLHDRHYIAQQHIFDSSQPAQLASILEEALCGVEQMRSALQAQGRHANDVPVSLYQETLQSLLGGQHG

SEQ ID NO: 122 - protein, 409 aa, Homo sapiens
MSGQEFWPGQSAADILSGAASRRRYLLYDVNPPEGFNLRRDVYIRIASLLKTLLKTEEWVLVLPPWGRLYHWQSPDIHQVRIPWSEFFDLPSLNKNIPVIEYEQFIAESGGPFIDQVYVLQSYAEGWKEGTWEEKVDERPCIDQLLYSQDKHEYYRGWFWGYEETRGLNVSCLSVQGSASIVAPLLLRNTSARSVMLDRAENLLHDHYGGKEYWDTRRSMVFARHLREVGDEFRSRHLNSTDDADRIPFQEDWMKMKVKLGSALGGPYLGVHLRRKDFIWGHRQDVPSLEGAVRKIRSLMKTHRLDKVFVATDAVRKEYEELKKLLPEMVRFEPTWEELELYKDGGVAIIDQWICAHARFFIGTSVSTFSFRIHEEREILGLDPKTTYNRFCGDQEKACEQPTHWKITY

SEQ ID NO: 123 - protein, 820 aa, Oryza sativa
MLCLTSSSSSAPAPLLPSLADRPSPGIAGGGGNVRLSVVSSPRRSWPGKVKTNFSVPATARKNKTMVTVVEEVDHLPIYDLDPKLEEFKDHFNYRIKRYLDQKCLIEKHEGGLEEFSKGYLKFGINTVDGATIYREWAPAAQEAQLIGEFNNWNGAKHKMEKDKFGIWSIKISHVNGKPAIPHNSKVKFRFRHGGGAWVDRIPAWIRYATFDASKFGAPYDGVHWDPPACERYVFKHPRPPKPDAPRIYEAHVGMSGEEPEVSTYREFADNVLPRIRANNYNTVQLMAIMEHSYYASFGYHVTNFFAVSSRSGTPEDLKYLVDKAHSLGLRVLMDVVHSHASNNVTDGLNGYDVGQNTHESYFHTGDRGYHKLWDSRLFNYANWEVLRFLLSNLRYWMDEFMFDGFRFDGVTSMLYHHHGINKGFTGNYKEYFSLDTDVDAIVYMMLANHLMHKLLPEATIVAEDVSGMPVLCRPVDEGGVGFDFRLAMAIPDRWIDYLKNKEDRKWSMSEIVQTLTNRRYTEKCIAYAESHDQSIVGDKTIAFLLMDKEMYTGMSDLQPASPTINRGIALQKMIHFITMALGGDGYLNFMGNEFGHPEWIDFPREGNNWSYDKCRRQWSLVDTDHLRYKYMNAFDQAMNALEEEFSFLSSSKQIVSDMNEKDKVIVFERGDLVFVFNFHPNKTYKGYKVGCDLPGKYRVALDSDALVFGGHGRVGHDVDHFTSPEGMPGVPETNFNNRPNSFKVLSPPRTCVAYYRVDEDREELRRGGAVASGKIVTEYIDVEATSGETISGGWKGSEKDDCGKKGMKFVFRSSDEDCK

SEQ ID NO: 124 - protein, 322 aa, Drosophila melanogaster
MVNISTINWVFVCGLSFCLGGIAVLSLMPLGSDCVCPLSNPLAKLAGGGEGVSVIKKEPADEKQPQPHDHGASVHKMALLVPFRDRFEELLQFVPHMTAFLKRQGVAHHIFVLNQVDRFRFNRASLINVGFQFASDVYDYIAMHDVDLLPLNDNLLYEYPSSLGPLHIAGPKLHPKYHYDNFVGGILLVRREHFKQMNGMSNQYWGWGLEDDEFFVRIRDAGLQVTRPQNIKTGTNDTFSHIHNRYHRKRDTQKCFNQKEMTRKRDHKTGLDNVKYKILKVHEMLIDQVPVTILNILLDCDVNKTPWCDCSGTAAAASAVQT

SEQ ID NO: 125 - protein, 484 aa, Bacillus megaterium
MKMKRVAKHTTAATLAAALLVGGGYQTFAKGNDSKDFNNSYGISHITRDNMVKIPQQQNSDQFKVPAFDESTIKNIASAKGKNASGNTIDLDVWDSWPLQNADGTVATYHGYQIVFALAGDPKDSNDTSVYLFYKKAGDKSIDSWKNAGRVFKDSDKFVPNDPHLKNQTQEWSGSGTLTKDGKVRLFYTDYSGKQYGKQTLTTAQVNMSQPNDNTLKVDGVEDYKSIFDGDGKIYQTVQQFIDEGGYDTGDNHTLRDPHYIEDNGHKYLVFEANTGTEDGYQGEDSLYNRAYYGGNNPFFQSEKKKLLEGSNKEKASLANGALGIIELNDDYTLKKVMKPLITSNTVTDEIERANIFKKDGKWYLFTDSRGSKMTIDGIGQDDVYMLGYVSNTLTGKYKPLNDTGLVLHMDLDPNDKTFTYSHFAVPQTKGDNVVITSYMTNRGFYEDNHSTFAPSFLVNIDGSKTSVVKDRVLEQGQLTVDED

SEQ ID NO: 126 - protein, 1040 aa, Arabidopsis thaliana
MTTKLSSFCFLTHGLAGISCEREHGSSRRFFYLPSRRLVSTSCKMRQQRGFDSSKRQEVKKGSPKPILSINSGLQSNNDEESDLENGSADSVPSLKSDAEKGSSIHGSIDMNHADENLEKKDDIQTTEVTRRKSKTAKKKGESIHATIDIGHDDGKNLDNITVPEVAKALSLNKSEGEQISDGQFGELMTMIRSAEKNILRLDEARATALDDLNKILSDKEALQGEINVLEMKLSETDERIKTAAQEKAHVELLEEQLEKLRHEMISPIESDGYVLALSKELETLKLENLSLRNDIEMLKSELDSVKDTGERVVVLEKECSGLESSVKDLESKLSVSQEDVSQLSTLKIECTDLWAKVETLQLLLDRATKQAEQAVIVLQQNQDLRNKVDKIEESLKEANVYKESSEKIQQYNELMQHKVTLLEERLEKSDAEIFSYVQLYQESIKEFQETLESLKEESKKKSRDEPVDDMPWDYWSRLLLTVDGWLLEKKIASNDADLLRDMVWKKDRRIHDTYIDVKDKNERDAISAFLKLVSSPTSSGLYVVHIAAEMAPVAKVGGLGDVVAGLGKALQRKGHLVEIILPKYDCMQYDRVRDLRALDTVVESYFDGKLYKNKIWIGTVEGLPVHFIEPQHPSKFFWRGQFYGEQDDFRRFSYFSRAALELLLQSGKKPDIIHCHDWQTAFVAPLYWDLYAPKGLDSARICFTCHNFEYQGTASASELGSCGLDVNQLNRPDRMQDHSSGDRVNPVKGAIIFSNIVTTVSPTYAQEVRTAEGGKGLHSTLNFHSKKFIGILNGIDTDSWNPATDPFLKAQFNAKDLQGKEENKHALRKQLGLSSAESRRPLVGCITRLVPQKGVHLIRHAIYRTLELGGQFVLLGSSPVPHIQREFEGIEQQFKSHDHVRLLLKYDEALSHTIYAASDLFIIPSIFEPCGLTQMIAMRYGSIPIARKTGGLNDSVFDIDDDTIPTQFQNGFTFQTADEQGFNYALERAFNHYKKDEEKWMRLVEKVMSIDFSWGSSATQYEELYTRSVSRARAVPNRT

SEQ ID NO: 127 - protein, 429 aa, Homo sapiens
MATLSFVFLLLGAVSWPPASASGQEFWPGQSAADILSGAASRRRYLLYDVNPPEGFNLRRDVYIRIASLLKTLLKTEEWVLVLPPWGRLYHWQSPDIHQVRIPWSEFFDLPSLNKNIPVIEYEQFIAESGGPFIDQVYVLQSYAEGWKEGTWEEKVDERPCIDQLLYSQDKHEYYRGWFWGYEETRGLNVSCLSVQGSASIVAPLLLRNTSARSVMLDRAENLLHDHYGGKEYWDTRRSMVFARHLREVGDEFRSRHLNSTDDADRIPFQEDWMKMKVKLGSALGGPYLGVHLRRKDFIWGHRQDVPSLEGAVRKIRSLMKTHRLDKVFVATDAVRKEYEELKKLLPEMVRFEPTWEELELYKDGGVAIIDQWICAHARFFIGTSVSTFSFRIHEEREILGLDPKTTYNRFCGDQEKACEQPTHWKITY

SEQ ID NO: 128 - protein, 506 aa, Streptococcus gordonii
MTVYNINLGIGWASSGVEYAQAYRAQILRRIQQPAKFIFMDMILADNIQHLTENIGFLDEEIIWLYNYFTDIKIAPTTVTLDQVLAQVAGQPERSEKEGKIVRYFYPQDDQFITCYLRQEDQDSVEHVEYVSRGRLIRKDYFSYVRYASEYFAPHNDAATLYQRRFYHEDGSVAYDMLIEDGQEKLYRFPDRIFYSKAELVRYFLQCLQLQADDVVILDRETGIGQVVFEESQKAKLGVVVHAEHFSENASSDDYILWNNFYDYQFTNADKVDFFIVATEAQKRILEQQFQHYSDKQPQIATIPVGSLDQLTYPKEPRKPYSMITASRLATEKHIDWLVAATVQAHAQLPELTLDIYGKGSEEDKLRRRIEEAGAQDYIRLKGHADLSQIYAGYELYLTASTSEGFGLTLMEAVGSGLPLIGFDVRYGNQTFIDDGKNGYLLPVSSNHVEDQIIAAFVEKIIALFSQGRQQEMSQHSYQVAENYLTSRVEAAWTQLLKEVRDDSAL

1. A method for transferring a sugar moiety to a substrate steviol glycoside, the method comprising contacting the substrate steviol glycoside with a glycosyltransferase polypeptide and a non-UDP-sugar sugar donor.

2. The method of claim 1, wherein the glycosyltransferase polypeptide comprises an amino acid sequence that is at least 60%, at least 65%, at least 70%, at least 75%, at least 80%, at least 85%, at least 90%, at least 95%, at least 98%, or at least 99% identical to an amino acid sequence selected from the group consisting of SEQ ID NOs: 1-128.

3. The method of claim 1 or claim 2, wherein the glycosyltransferase polypeptide comprises an amino acid sequence selected from the group consisting of SEQ ID NOs: 1-128.

4. The method of any one of claims 1-3, wherein the glycosyltransferase polypeptide comprises an amino acid sequence selected from the group consisting of SEQ ID NOs: 1, 19, 29, 32, 41, 42, 43, 44, 45, 46, 47, 48, 49, 50, 51, 52, 53, 54, 55, 56, 58, 61, 65, 67, 68, 81, 87, 90, 91, 92, 93, 94, 95, 96, 97, 98, 99, 100, 101, 102, 105, 106, 116, 120, 122, and 127.

5. The method of any one of claims 1-3, wherein the glycosyltransferase polypeptide comprises an amino acid sequence selected from the group consisting of SEQ ID NOs: 2, 3, 22, 29, 39, 41, 42, 45, 49, 50, 51, 52, 53, 54, 55, 56, 62, 63, 72, 87, 90, 91, 94, 97, 98, 99, 100, 101, 102, 109, 110, 111, 112, 113, 115, 117, 118, 119, 121, 123, 124, 125, 126, and 128.

6. The method of any one of claims 1-5, wherein the substrate steviol glycoside is steviol, steviol-13-O-glucoside, steviol-19-O-glucoside, rubusoside, steviol-1,2-bioside, steviol-1,3-bioside, rubusoside, dulcoside B, dulcoside A, rebaudioside B, rebaudioside G, stevioside, rebaudioside C, rebaudioside F, rebaudioside A, rebaudioside I, rebaudioside E, rebaudioside H, rebaudioside L, rebaudioside K, rebaudioside J, rebaudioside M, rebaudioside D, rebaudioside N, rebaudioside O, rebaudioside Q, an isomer thereof, a synthetic steviol glycoside or combinations thereof.

7. The method of any one of claims 1-6, wherein the substrate steviol glycoside is rebaudioside A, an isomer thereof, or combinations thereof.

8. The method of any one of claims 1-6, wherein the substrate steviol glycoside is rebaudioside D, an isomer thereof, or combinations thereof.

9. The method of any one of claims 1-8, wherein the non-UDP-sugar sugar donor is alpha-glucose-1-phosphate, beta-glucose-1-phosphate, cellobiose, sucrose, maltose, gentiobiose, trehalose, kojibiose, nigerose, isomaltose, beta-beta-trehalose, alpha-beta-trehalose, sophorose, laminaribiose, turanose, maltulose, palatinose, gentiobiulose, nigerotriose, maltotriose, melezitose, maltotriulose, kestose, starch, cellulose, glycogen, amylose, amylopectin, dextran, dextrin, maltodextrin, glucose syrup, cellodextrin, cyclodextrin, a non-UDP nucleotide sugar (i.e. ADP-glucose, GDP-glucose, CDP-glucose, TDP-glucose), or a steviol glycoside.

10. The method of any one of claims 1-8, wherein the non-UDP-sugar sugar donor is not alpha-glucose-1-phosphate.

11. The method of any one of claims 1-8, wherein the non-UDP-sugar sugar donor is not beta-glucose-1-phosphate.

12. The method of any one of claims 1-11, wherein the glucosyltransferase polypeptide is expressed in a host microorganism.

13. The method of claim 12, wherein the host microorganism is E. coli, Saccharomyces sp., Aspergillus sp., Pichia sp., or Bacillus sp.

14. The method of any one of claims 1-13, wherein the glucosyltransferase polypeptide is immobilized to a solid support.

15. The method of claim 14, wherein the solid support is derivatized cellulose, glass, ceramic, methacrylate, styrene, acrylic, a metal oxide, or a membrane.

16. The method of claim 14 or claim 15, wherein the glucosyltransferase polypeptide is immobilized to the solid support by covalent attachment, adsorption, cross-linking, entrapment, or encapsulation.

17. The method of any one of claims 1-16, wherein the contacting the substrate steviol glycoside with the glycosyltransferase polypeptide and the non-UDP-sugar sugar donor is in a reaction medium comprising pyridoxal phosphate (PLP) and/or one or more metal ions.

18. The method of any one of claims 1-17, wherein the contacting the substrate steviol glycoside with the glycosyltransferase polypeptide and the non-UDP-sugar sugar donor is at temperature between about 0° C. and about 60° C.

19. The method of any one of claims 1-18, wherein the contacting the substrate steviol glycoside with the glycosyltransferase polypeptide and the non-UDP-sugar sugar donor is at temperature about 30° C.

20. The method of any one of claims 1-19, wherein the contacting the substrate steviol glycoside with the glycosyltransferase polypeptide and the non-UDP-sugar sugar donor is carried out in a duration of time between 1 hour and 1 week.

21. The method of any one of claims 1-20, wherein the contacting the substrate steviol glycoside with the glycosyltransferase polypeptide and the non-UDP-sugar sugar donor is carried out in a duration of time of about 24 hours.

22. A method for producing a target steviol glycoside composition, comprising the steps of:
(a) providing a starting composition comprising greater than about 0.5%, about 1%, about 2%, about 3%, about 4%, about 5%, about 10%, about 20%, about 30%, about 40%, about 50%, about 60%, about 70%, about 80%, about 90%, about 92%, about 93%, about 94%, about 95%, about 96%, about 97%, about 98%, about 99%, or about 99.6% of a substrate steviol glycoside by weight on an anhydrous basis;
(b) contacting the starting composition with a glycosyltransferase polypeptide and a non-UDP-sugar sugar donor; and
(c) producing a target composition comprising a target steviol glycoside.

23. The method of claim 22, wherein the glycosyltransferase polypeptide comprises an amino acid sequence that is at least 60%, at least 65%, at least 70%, at least 75%, at least 80%, at least 85%, at least 90%, at least 95%, at least 98%, or at least 99% identical to an amino acid sequence selected from the group consisting of SEQ ID NOs: 1-128.

24. The method of claim 22 or claim 23, wherein the target composition comprises greater than about 0.5%, about 1%, about 2%, about 3%, about 4%, about 5%, about 10%, about 20%, about 30%, about 40%, about 50%, about 60%, about 70%, about 80%, about 85%, about 90%, about 91%, about 92%, about 93%, about 94%, about 95%, about 96%, about 97%, about 98%, about 99%, about 99.6% of the target steviol glycoside by weight on an anhydrous basis.

25. The method of any one of claims 22-24, wherein the substrate steviol glycoside is steviol, steviol-13-O-glucoside, steviol-19-O-glucoside, rubusoside, steviol-1,2-bioside, steviol1,3-bioside, rubusoside, dulcoside B, dulcoside A, rebaudioside B, rebaudioside G, stevioside, rebaudioside C, rebaudioside F, rebaudioside A, rebaudioside I, rebaudioside E, rebaudioside H, rebaudioside L, rebaudioside K, rebaudioside J, rebaudioside M, rebaudioside D, rebaudioside N, rebaudioside O, rebaudioside Q, an isomer thereof, a synthetic steviol glycoside or combinations thereof.

26. The method of any one of claims 22-25, wherein the non-UDP-sugar sugar donor is alpha-glucose-1-phosphate, beta-glucose-1-phosphate, cellobiose, sucrose, maltose, gentiobiose, trehalose, kojibiose, nigerose, isomaltose, beta-beta-trehalose, alpha-beta-trehalose, sophorose, laminaribiose, turanose, maltulose, palatinose, gentiobiulose, nigerotriose, maltotriose, melezitose, maltotriulose, kestose, starch, cellulose, glycogen, amylose, amylopectin, dextran, dextrin, maltodextrin, glucose syrup, cellodextrin, cyclodextrin, a non-UDP nucleotide sugar (i.e. ADP-glucose, GDP-glucose, CDP-glucose, TDP-glucose), or a steviol glycoside.

27. The method of any one of claims 22-25, wherein the non-UDP-sugar sugar donor is not alpha-glucose-1-phosphate.

28. The method of any one of claims 22-25, wherein the non-UDP-sugar sugar donor is not beta-glucose-1-phosphate.

29. The method of any one of claims 22-28, wherein at least about 5%, about 10%, about 20%, about 30%, about 40%, about 50%, about 60%, about 70%, about 80%, or about 90% of the substrate steviol glycoside in the starting composition is converted to the target steviol glycoside.

30. The method of any one of claims 22-29, wherein the substrate steviol glycoside is rebaudioside A, or isomers thereof; and the target steviol glycoside is rebaudioside D, or isomers thereof

31. The method of claim 30, wherein the target steviol glycoside is a rebaudioside D isomer.

32. The method of claim 30, wherein the rebaudioside D isomer is rebaudioside D_1.07, rebaudioside D_0.77, rebaudioside D_1.21, rebaudioside D_1.25, or rebaudioside D_ 1.29.

33. The method of any one of claims 22-29, wherein the substrate steviol glycoside is rebaudioside A, or isomers thereof; and the target steviol glycoside is rebaudioside M, or isomers thereof

34. The method of claim 33, wherein the target steviol glycoside is a rebaudioside M isomer.

35. The method of claim 34, wherein the rebaudioside M isomer is rebaudioside M_0.66, rebaudioside M_0.80, rebaudioside M_0.92, rebaudioside M_1.06, rebaudioside M_1.11, rebaudioside M_1.17, or rebaudioside M_1.51.

36. The method of any one of claims 22-29, wherein the substrate steviol glycoside is rebaudioside A, or isomers thereof; and the target steviol glycoside is a rebaudioside Mp1 isomer.

37. The method of claim 36, wherein the rebaudioside Mp1 isomer is rebaudioside Mp1_0.62, rebaudioside Mp1_0.76, rebaudioside Mp1_0.82, rebaudioside Mp1_0.88, rebaudioside Mp1_0.94, rebaudioside Mp1_1.09, rebaudioside Mp1_1.14, rebaudioside Mp1_1.19, rebaudioside Mp1_1.27, rebaudioside Mp1_1.42, or rebaudioside Mp1_1.66.

38. The method of any one of claims 22-29, wherein the substrate steviol glycoside is rebaudioside D, or isomers thereof; and the target steviol glycoside is rebaudioside M, or isomers thereof

39. The method of claim 38, wherein the substrate steviol glycoside is a rebaudioside D isomer.

40. The method of claim 39, wherein the rebaudioside D isomer is rebaudioside D_1.07, rebaudioside D_0.77, rebaudioside D_1.21, rebaudioside D_1.25, or rebaudioside D_1.29.

41. The method of any one of claims 38-40, wherein the target steviol glycoside is a rebaudioside M isomer.

42. The method of claim 41, wherein the rebaudioside M isomer is rebaudioside M_0.66, rebaudioside M_0.80, rebaudioside M_0.92, rebaudioside M_1.06, rebaudioside M_1.11, rebaudioside M_1.17, or rebaudioside M_1.51.

43. The method of any one of claims 22-42, wherein the starting composition is a Stevia rebaudiana extract.

44. The method of any one of claims 22-43, wherein the glucosyltransferase polypeptide is expressed in a host microorganism.

45. The method of claim 44, wherein the host microorganism is E. coli, Saccharomyces sp., Aspergillus sp., Pichia sp., or Bacillus sp.

46. The method of any one of claims 22-45, wherein the glucosyltransferase polypeptide is immobilized to a solid support.

47. The method of claim 46, wherein the solid support is derivatized cellulose, glass, ceramic, methacrylate, styrene, acrylic, a metal oxide, or a membrane.

48. The method of any one of claims 22-47, wherein the step of contacting the starting composition with the glycosyltransferase polypeptide and the non-UDP-sugar sugar donor is in a reaction medium comprising pyridoxal phosphate (PLP) and/or one or more metal ions.

49. The method of any one of claims 22-48, wherein the step of contacting the starting composition with the glycosyltransferase polypeptide and the non-UDP-sugar sugar donor is at temperature between about 0° C. and about 60° C.

50. The method of any one of claims 22-49, wherein the step of contacting the starting composition with the glycosyltransferase polypeptide and the non-UDP-sugar sugar donor is at temperature about 30° C.

51. The method of any one of claims 22-50, wherein the step of contacting the starting composition with the glycosyltransferase polypeptide and the non-UDP-sugar sugar donor is carried out in a duration of time between 1 hour and 1 week.

52. The method of any one of claims 22-51, wherein the step of contacting the starting composition with the glycosyltransferase polypeptide and the non-UDP-sugar sugar donor is carried out in a duration of time of about 24 hours.

53. A method for producing a target steviol glycoside composition, comprising the steps of:
(a) providing a starting composition comprising greater than about 0.5%, about 1%, about 2%, about 3%, about 4%, about 5%, about 10%, about 20%, about 30%, about 40%, about 50%, about 60%, about 70%, about 80%, about 90%, about 92%, about 93%, about 94%, about 95%, about 96%, about 97%, about 98%, about 99%, or about 99.6% of a substrate steviol glycoside by weight on an anhydrous basis;
(b) contacting the starting composition with a first glycosyltransferase polypeptide and a non-UDP-sugar sugar donor;
(c) producing an intermediate composition comprising an intermediate target steviol glycoside;
(d) contacting the intermediate composition with a second glycosyltransferase polypeptide and the non-UDP-sugar sugar donor; and
(e) producing a target composition comprising a target steviol glycoside.

54. The method of claim 53, wherein the first glycosyltransferase polypeptide comprises an amino acid sequence that is at least 60%, at least 65%, at least 70%, at least 75%, at least 80%, at least 85%, at least 90%, at least 95%, at least 98%, or at least 99% identical to an amino acid sequence selected from the group consisting of SEQ ID NOs: 1-128.

55. The method of claim 53 or claim 54, wherein the second glycosyltransferase polypeptide comprises an amino acid sequence that is at least 60%, at least 65%, at least 70%, at least 75%, at least 80%, at least 85%, at least 90%, at least 95%, at least 98%, or at least 99% identical to an amino acid sequence selected from the group consisting of SEQ ID NOs: 1-128.

56. The method of any one of claims 53-55, wherein the first glycosyltransferase polypeptide and the second glycosyltransferase polypeptide are identical.

57. The method of any one of claims 53-55, wherein the first glycosyltransferase polypeptide and the second glycosyltransferase polypeptide are different.

58. The method of any one of claims 53-57, wherein the intermediate composition comprises greater than about 5%, about 10%, about 20%, about 30%, about 40%, about 50%, about 60%, about 70%, about 80%, about 85%, about 90%, about 91%, about 92%, about 93%, about 94%, about 95%, about 96%, about 97%, about 98%, about 99%, or about 99.6% of the intermediate target steviol glycoside by weight on an anhydrous basis.

59. The method of any one of claims 53-58, wherein the target composition comprises greater than about 0.5%, about 1%, about 2%, about 3%, about 4%, about 5%, about 10%, about 20%, about 30%, about 40%, about 50%, about 60%, about 70%, about 80%, about 85%, about 90%, about 91%, about 92%, about 93%, about 94%, about 95%, about 96%, about 97%, about 98%, about 99%, or about 99.6% of the target steviol glycoside by weight on an anhydrous basis.

60. The method of any one of claims 53-59, wherein the substrate steviol glycoside is steviol, steviol-13-O-glucoside, steviol-19-O-glucoside, rubusoside, steviol-1,2-bioside, steviol1,3-bioside, rubusoside, dulcoside B, dulcoside A, rebaudioside B, rebaudioside G, stevioside, rebaudioside C, rebaudioside F, rebaudioside A, rebaudioside I, rebaudioside E, rebaudioside H, rebaudioside L, rebaudioside K, rebaudioside J, rebaudioside M, rebaudioside D, rebaudioside N, rebaudioside O, rebaudioside Q, an isomer thereof, a synthetic steviol glycoside or combinations thereof.

61. The method of any one of claims 53-60, the non-UDP-sugar sugar donor is alpha-glucose-1-phosphate, beta-glucose-1-phosphate, cellobiose, sucrose, maltose, gentiobiose, trehalose, kojibiose, nigerose, isomaltose, beta-beta-trehalose, alpha-beta-trehalose, sophorose, laminaribiose, turanose, maltulose, palatinose, gentiobiulose, nigerotriose, maltotriose, melezitose, maltotriulose, kestose, starch, cellulose, glycogen, amylose, amylopectin, dextran, dextrin, maltodextrin, glucose syrup, cellodextrin, cyclodextrin, a non-UDP nucleotide sugar (i.e. ADP-glucose, GDP-glucose, CDP-glucose, TDP-glucose), or a steviol glycoside.

62. The method of any one of claims 53-61, wherein the non-UDP-sugar sugar donor is not alpha-glucose-1-phosphate.

63. The method of any one of claims 53-62, wherein the non-UDP-sugar sugar donor is not beta-glucose-1-phosphate.

64. The method of any one of claims 53-63, wherein at least about 5%, about 10%, about 20%, about 30%, about 40%, about 50%, about 60%, about 70%, about 80%, or about 90% of the substrate steviol glycoside in the starting composition is converted to the intermediate target steviol glycoside.

65. The method of any one of claims 53-64, wherein at least about 5%, about 10%, about 20%, about 30%, about 40%, about 50%, about 60%, about 70%, about 80%, or about 90% of the intermediate target steviol glycoside in the intermediate composition is converted to the target steviol glycoside.

66. The method of any one of claims 53-65, wherein the substrate steviol glycoside is rebaudioside A, or isomers thereof; and the intermediate steviol glycoside is rebaudioside D, or isomers thereof; and the target steviol glycoside is rebaudioside M, or isomers thereof.

67. The method of any one of claims 53-66, wherein the starting composition is a Stevia rebaudiana extract.

68. The method of any one of claims 53-67, wherein the glucosyltransferase polypeptide is expressed in a host microorganism.

69. The method of claim 68, wherein the host microorganism is E. coli, Saccharomyces sp., Aspergillus sp., Pichia sp., or Bacillus sp.

70. The method of any one of claims 53-69, wherein the glucosyltransferase polypeptide is immobilized to a solid support.

71. The method of claim 70, wherein the solid supports is derivatized cellulose or glass, ceramics, methacrylate, styrene, acrylic, metal oxides, or membranes.

72. The method of any one of claims 53-71, wherein the step of contacting the starting composition with the first glycosyltransferase polypeptide and the non-UDP-sugar sugar donor is in a reaction medium comprising pyridoxal phosphate (PLP) and/or one or more metal ions.

73. The method of any one of claims 53-72, wherein the step of contacting the starting composition with the first glycosyltransferase polypeptide and the non-UDP-sugar sugar donor is at temperature between about 0° C. and about 60° C.

74. The method of any one of claims 53-73, wherein the step of contacting the starting composition with the first glycosyltransferase polypeptide and the non-UDP-sugar sugar donor is at temperature about 30° C.

75. The method of any one of claims 53-74, wherein the step of contacting the starting composition with the first glycosyltransferase polypeptide and the non-UDP-sugar sugar donor is carried out in a duration of time between 1 hour and 1 week.

76. The method of any one of claims 53-75, wherein the step of contacting the starting composition with the first glycosyltransferase polypeptide and the non-UDP-sugar sugar donor is carried out in a duration of time of about 24 hours.

77. The method of any one of claims 53-76, wherein the step of contacting the intermediate composition with the second glycosyltransferase polypeptide and the non-UDP-sugar sugar donor is in a reaction medium comprising pyridoxal phosphate (PLP) and/or one or more metal ions.

78. The method of any one of claims 53-77, wherein the step of contacting the intermediate composition with the second glycosyltransferase polypeptide and the non-UDP-sugar sugar donor is at temperature between about 0° C. and about 60° C.

79. The method of any one of claims 53-78, wherein the step of contacting the intermediate composition with the second glycosyltransferase polypeptide and the non-UDP-sugar sugar donor is at temperature about 30° C.

80. The method of any one of claims 53-79, wherein the step of contacting the intermediate composition with the second glycosyltransferase polypeptide and the non-UDP-sugar sugar donor is carried out in a duration of time between 1 hour and 1 week.

81. The method of any one of claims 53-80, wherein the step of contacting the intermediate composition with the second glycosyltransferase polypeptide and the non-UDP-sugar sugar donor is carried out in a duration of time of about 24 hours.

82. A recombinant glycosyltransferase polypeptide comprising an amino acid sequence that is at least 60%, at least 65%, at least 70%, at least 75%, at least 80%, at least 85%, at least 90%, at least 95%, at least 98%, or at least 99% identical to an amino acid sequence selected from the group consisting of SEQ ID NOs: 1-128.

83. The recombinant glycosyltransferase polypeptide of claim 82, wherein the glycosyltransferase polypeptide comprises an amino acid sequence that is at least 60% identical to identical to an amino acid sequence selected from the group consisting of SEQ ID NOs: 1, 19, 29, 32, 41, 42, 43, 44, 45, 46, 47, 48, 49, 50, 51, 52, 53, 54, 55, 56, 58, 61, 65, 67, 68, 81, 87, 90, 91, 92, 93, 94, 95, 96, 97, 98, 99, 100, 101, 102, 105, 106, 116, 120, 122, and 127.

84. The recombinant glycosyltransferase polypeptide of claim 82, wherein the glycosyltransferase polypeptide comprises an amino acid sequence that is at least 60% identical to identical to an amino acid sequence selected from the group consisting of SEQ ID NOs: 2, 3, 22, 29, 39, 41, 42, 45, 49, 50, 51, 52, 53, 54, 55, 56, 62, 63, 72, 87, 90, 91, 94, 97, 98, 99, 100, 101, 102, 109, 110, 111, 112, 113, 115, 117, 118, 119, 121, 123, 124, 125, 126, and 128.

85. The recombinant glycosyltransferase polypeptide of claim 82, wherein the glycosyltransferase polypeptide comprises an amino acid sequence selected from the group consisting of SEQ ID NOs: 1-128.

86. The recombinant glycosyltransferase polypeptide of claim 82 or claim 83, wherein the glycosyltransferase polypeptide comprises an amino acid sequence selected from the group consisting of SEQ ID NOs: 1, 19, 29, 32, 41, 42, 43, 44, 45, 46, 47, 48, 49, 50, 51, 52, 53, 54, 55, 56, 58, 61, 65, 67, 68, 81, 87, 90, 91, 92, 93, 94, 95, 96, 97, 98, 99, 100, 101, 102, 105, 106, 116, 120, 122, and 127.

87. The recombinant glycosyltransferase polypeptide of claim 82 or claim 84, wherein the glycosyltransferase polypeptide comprises an amino acid sequence selected from the group consisting of SEQ ID NOs: 2, 3, 22, 29, 39, 41, 42, 45, 49, 50, 51, 52, 53, 54, 55, 56, 62, 63, 72, 87, 90, 91, 94, 97, 98, 99, 100, 101, 102, 109, 110, 111, 112, 113, 115, 117, 118, 119, 121, 123, 124, 125, 126, and 128.

88. The recombinant glycosyltransferase polypeptide of any one of claims 82-87, wherein the glycosyltransferase polypeptide is capable of transferring a sugar moiety to a substrate steviol glycoside.

89. The recombinant glycosyltransferase polypeptide of claim 88, wherein the substrate steviol glycoside is steviol, steviol-13-O-glucoside, steviol-19-O-glucoside, rubusoside, steviol-1,2-bioside, steviol-1,3-bioside, rubusoside, dulcoside B, dulcoside A, rebaudioside B, rebaudioside G, stevioside, rebaudioside C, rebaudioside F, rebaudioside A, rebaudioside I, rebaudioside E, rebaudioside H, rebaudioside L, rebaudioside K, rebaudioside J, rebaudioside M, rebaudioside D, rebaudioside N, rebaudioside O, rebaudioside Q, an isomer thereof, a synthetic steviol glycoside or combinations thereof

90. The recombinant glycosyltransferase polypeptide of claim 88 or claim 89, wherein the substrate steviol glycoside is rebaudioside A, or an isomer thereof

91. The recombinant glycosyltransferase polypeptide of claim 88 or claim 89, wherein the substrate steviol glycoside is rebaudioside D, or an isomer thereof

92. The recombinant glycosyltransferase polypeptide of any one of claims 82-91, wherein the non-UDP-sugar sugar donor is alpha-glucose-1-phosphate, beta-glucose-1-phosphate, cellobiose, sucrose, maltose, gentiobiose, trehalose, kojibiose, nigerose, isomaltose, beta-beta-trehalose, alpha-beta-trehalose, sophorose, laminaribiose, turanose, maltulose, palatinose, gentiobiulose, nigerotriose, maltotriose, melezitose, maltotriulose, kestose, starch, cellulose, glycogen, amylose, amylopectin, dextran, dextrin, maltodextrin, glucose syrup, cellodextrin, cyclodextrin, a non-UDP nucleotide sugar (i.e. ADP-glucose, GDP-glucose, CDP-glucose, TDP-glucose), or a steviol glycoside.

93. The recombinant glycosyltransferase polypeptide of any one of claims 82-92, wherein the glucosyltransferase polypeptide is expressed in a host microorganism.

94. The recombinant glycosyltransferase polypeptide of claim 93, wherein the host microorganism is E. coli, Saccharomyces sp., Aspergillus sp., Pichia sp., or Bacillus sp.

95. The recombinant glycosyltransferase polypeptide of any one of claims 82-92, wherein the glucosyltransferase polypeptide is immobilized to a solid support.

96. The recombinant glycosyltransferase polypeptide of claim 95, wherein the solid supports is derivatized cellulose, glass, ceramic, methacrylate, styrene, acrylic, a metal oxide, or a membrane.

97. A modified microorganism expressing a glycosyltransferase polypeptide comprises an amino acid sequence that is at least 60%, at least 65%, at least 70%, at least 75%, at least 80%, at least 85%, at least 90%, at least 95%, at least 98%, or at least 99% identical to an amino acid sequence selected from the group consisting of SEQ ID NOs: 1-128.

98. The modified microorganism of claim 97, wherein the glycosyltransferase polypeptide comprises an amino acid sequence that is at least 60% identical to an amino acid sequence selected from the group consisting of SEQ ID NOs: 1, 19, 29, 32, 41, 42, 43, 44, 45, 46, 47, 48, 49, 50, 51, 52, 53, 54, 55, 56, 58, 61, 65, 67, 68, 81, 87, 90, 91, 92, 93, 94, 95, 96, 97, 98, 99, 100, 101, 102, 105, 106, 116, 120, 122, and 127.

99. The modified microorganism of claim 97, wherein the glycosyltransferase polypeptide comprises an amino acid sequence that is at least 60% identical to an amino acid sequence selected from the group consisting of SEQ ID NOs: 2, 3, 22, 29, 39, 41, 42, 45, 49, 50, 51, 52, 53, 54, 55, 56, 62, 63, 72, 87, 90, 91, 94, 97, 98, 99, 100, 101, 102, 109, 110, 111, 112, 113, 115, 117, 118, 119, 121, 123, 124, 125, 126, and 128.

100. The modified microorganism of claim 97, wherein the glycosyltransferase polypeptide comprises an amino acid sequence selected from the group consisting of SEQ ID NOs: 1-128.

101. The modified microorganism of claim 97 or claim 98, wherein the glycosyltransferase polypeptide comprises an amino acid sequence selected from the group consisting of SEQ ID NOs: 1, 19, 29, 32, 41, 42, 43, 44, 45, 46, 47, 48, 49, 50, 51, 52, 53, 54, 55, 56, 58, 61, 65, 67, 68, 81, 87, 90, 91, 92, 93, 94, 95, 96, 97, 98, 99, 100, 101, 102, 105, 106, 116, 120, 122, and 127

102. The modified microorganism of claim 97 or claim 99, wherein the glycosyltransferase polypeptide comprises an amino acid sequence selected from the group consisting of SEQ ID NOs: 2, 3, 22, 29, 39, 41, 42, 45, 49, 50, 51, 52, 53, 54, 55, 56, 62, 63, 72, 87, 90, 91, 94, 97, 98, 99, 100, 101, 102, 109, 110, 111, 112, 113, 115, 117, 118, 119, 121, 123, 124, 125, 126, and 128.

103. The modified microorganism of any one of claims 97-102, wherein the glycosyltransferase polypeptide is capable of transferring a sugar moiety to a substrate steviol glycoside.

104. The modified microorganism of claim 103, wherein the substrate steviol glycoside is steviol, steviol-13-O-glucoside, steviol-19-O-glucoside, rubusoside, steviol-1,2-bioside, steviol-1,3-bioside, rubusoside, dulcoside B, dulcoside A, rebaudioside B, rebaudioside G, stevioside, rebaudioside C, rebaudioside F, rebaudioside A, rebaudioside I, rebaudioside E, rebaudioside H, rebaudioside L, rebaudioside K, rebaudioside J, rebaudioside M, rebaudioside D, rebaudioside N, rebaudioside O, rebaudioside Q, an isomer thereof, a synthetic steviol glycoside or combinations thereof

105. The modified microorganism of claim 103 or claim 104, wherein the substrate steviol glycoside is rebaudioside A, or an isomer thereof.

106. The modified microorganism of claim 103 or claim 104, wherein the substrate steviol glycoside is rebaudioside D, or an isomer thereof.

107. The modified microorganism of any one of claims 97-106, wherein the non-UDPsugar sugar donor is alpha-glucose-1-phosphate, beta-glucose-1-phosphate, cellobiose, sucrose, maltose, gentiobiose, trehalose, kojibiose, nigerose, isomaltose, beta-beta-trehalose, alpha-beta-trehalose, sophorose, laminaribiose, turanose, maltulose, palatinose, gentiobiulose, nigerotriose, maltotriose, melezitose, maltotriulose, kestose, starch, cellulose, glycogen, amylose, amylopectin, dextran, dextrin, maltodextrin, glucose syrup, cellodextrin, cyclodextrin, a non-UDP nucleotide sugar (i.e. ADP-glucose, GDP-glucose, CDP-glucose, TDP-glucose), or a steviol glycoside.

108. The modified microorganism of any one of claims 97-107, wherein the modified microorganism is E. coli, Saccharomyces sp., Aspergillus sp., Pichia sp., or Bacillus sp.

109. The modified microorganism of any one of claims 97-108, wherein the glucosyltransferase polypeptide is immobilized to a solid support.

110. The modified microorganism of claim 109, wherein the solid supports is derivatized cellulose, glass, ceramic, methacrylate, styrene, acrylic, a metal oxide, or a membrane.
